(19) United States
(12) Patent Application Publication
(10) Pub. No.: US 2004/0054156 A1
(43) Pub. Date: Mar. 18, 2004

(54) Method and reagent for inhibiting hepatitis B viral replication

(76) Inventors: Kenneth Draper, Reno, NV (US); Lawrence Blatt, Boulder, CO (US); James A. McSwiggen, Boulder, CO (US); David Morrissey, Boulder, CO (US)

Correspondence Address: Christopher P. Singer, McDonnell Boehnen Hulbert & Berghoff, 32nd Floor, 300 S. Wacker Drive, Chicago, IL, 60606, US

(21) Appl. No.: 10/342,902

(22) Filed: Jan. 15, 2003

Related U.S. Application Data
(63) Continuation-in-part of application No. 09/877,478, filed on Jun. 8, 2001, now abandoned.
(63) Continuation-in-part of application No. 09/696,347, filed on Oct. 24, 2000, now abandoned.
(63) Continuation-in-part of application No. 09/636,385, filed on Aug. 9, 2000, now abandoned.
(63) Continuation-in-part of application No. 09/531,025, filed on Mar. 20, 2000, now abandoned.
(63) Continuation-in-part of application No. 09/436,430, filed on Nov. 8, 1999.
(63) Continuation of application No. 08/193,627, filed on Feb. 7, 1994, now Pat. No. 6,017,756.
(63) Continuation of application No. 07/882,712, filed on May 14, 1992, now abandoned.

(51) Int. Cl. C07H 21/02; C12N 5/08; A61K 48/00

(52) U.S. Cl. 536/23.1; 435/366; 424/93.21

(57) ABSTRACT

The present invention relates to nucleic acid molecules, including antisense and enzymatic nucleic acid molecules, such as hammerhead ribozymes, DNAzymes, Inozymes, Zinzymes, Amberzymes, and G-cleaver ribozymes, which modulate the synthesis, expression and/or stability of an RNA encoding one or more protein components of Hepatitis B virus (HBV), and methods for their use alone or in combination with other therapies, such as 3TC® (Lamivudine) and Interferons are disclosed.

[0001] This patent application is a continuation-in-part of Draper et al., U.S. Ser. No. (09/877,478), filed Jun. 8, 2001, entitled “METHOD AND REAGENT FOR INHIBITING HEPATITIS B VIRUS REPLICATION”, which is a continuation-in-part of Draper et al., U.S. Ser. No. (09/696,347), filed Oct. 24, 2000, entitled “METHOD AND REAGENT FOR INHIBITING HEPATITIS B VIRUS REPLICATION”, which is a continuation-in-part of Draper et al., U.S. Ser. No. (09/636,385), filed Aug. 9, 2000, entitled “METHOD AND REAGENT FOR INHIBITING HEPATITIS B VIRUS REPLICATION”, which is a continuation in part of Draper et al., U.S. Ser. No. (09/531,025), filed Mar. 20, 2000, entitled “METHOD AND REAGENT FOR INHIBITING HEPATITIS B VIRUS REPLICATION”, which is a continuation in part of Draper, U.S. Ser. No. (09/436,430), filed Nov. 8, 1999, entitled “METHOD AND REAGENT FOR INHIBITING HEPATITIS B VIRUS REPLICATION”, which is a continuation of U.S. Ser. No. (08/193,627), filed Feb. 7, 1994, now U.S. Pat. No. 6,017,756, which is a continuation of U.S. Ser. No. (07/882,712), filed May 14, 1992, entitled “METHOD AND REAGENT FOR INHIBITING HEPATITIS B VIRUS REPLICATION”, now abandoned. These applications are hereby incorporated by reference herein in their entireties, including the drawings.

### BACKGROUND OF THE INVENTION

[0002] The present invention concerns compounds, compositions, and methods for the study, diagnosis, and treatment of degenerative and disease states related to hepatitis B virus (HBV) replication and gene expression. Specifically, the invention relates to nucleic acid molecules used to inhibit expression of HBV.

[0003] The following is a discussion of relevant art pertaining to hepatitis B virus (HBV). The discussion is not meant to be complete and is provided only for understanding of the invention that follows. The summary is not an admission that any of the work described below is prior art to the claimed invention.

[0004] Chronic hepatitis B is caused by an enveloped virus, commonly known as the hepatitis B virus or HBV. HBV is transmitted via infected blood or other body fluids, especially saliva and semen, during delivery, sexual activity, or sharing of needles contaminated by infected blood. Individuals may be “carriers” and transmit the infection to others without ever having experienced symptoms of the disease. Persons at highest risk are those with multiple sex partners, those with a history of sexually transmitted diseases, parenteral drug users, infants born to infected mothers, “close” contacts or sexual partners of infected persons, and healthcare personnel or other service employees who have contact with blood. Transmission is also possible via tattooing, ear or body piercing, and acupuncture; the virus is also stable on razors, toothbrushes, baby bottles, eating utensils, and some hospital equipment such as respirators, scopes and instruments. There is no evidence that HBsAg positive food handlers pose a health risk in an occupational setting, nor should they be excluded from work. Hepatitis B has never been documented as being a food-borne disease. The average incubation period is 60 to 90 days, with a range of 45 to 180; the number of days appears to be related to the amount of virus to which the person was exposed. However, determining the length of incubation is difficult, since onset of symptoms is insidious. Approximately 50% of patients develop symptoms of acute hepatitis that last from 1 to 4 weeks. Two percent or less of these individuals develop fulminant hepatitis resulting in liver failure and death.

[0005] The determinants of severity include: (1) The size of the dose to which the person was exposed; (2) the person's age with younger patients experiencing a milder form of the disease; (3) the status of the immune system with those who are immunosuppressed experiencing milder cases; and (4) the presence or absence of co-infection with the Delta virus (hepatitis D), with more severe cases resulting from co-infection. In symptomatic cases, clinical signs include loss of appetite, nausea, vomiting, abdominal pain in the right upper quadrant, arthralgia, and tiredness/loss of energy. Jaundice is not experienced in all cases, however, jaundice is more likely to occur if the infection is due to transfusion or percutaneous serum transfer, and it is accompanied by mild pruritus in some patients. Bilirubin elevations are demonstrated in dark urine and clay-colored stools, and liver enlargement may occur accompanied by right upper-quadrant pain. The acute phase of the disease may be accompanied by severe depression, meningitis, Guillain-Barré syndrome, myelitis, encephalitis, agranulocytosis, and/or thrombocytopenia.

[0006] Hepatitis B is generally self-limiting and will resolve in approximately 6 months. Asymptomatic cases can be detected by serologic testing, since the presence of the virus leads to production of large amounts of HBsAg in the blood. This antigen is the first and most useful diagnostic marker for active infections. However, if HBsAg remains positive for 20 weeks or longer, the person is likely to remain positive indefinitely and is now a carrier. While only 10% of persons over age 6 who contract HBV become carriers, 90% of infants infected during the first year of life do so.

[0007] Hepatitis B virus (HBV) infects over 300 million people worldwide (Imperial, 1999, Gastroenterol. Hepatol., 14 (suppl), S1-5). In the United States approximately 1.25 million individuals are chronic carriers of HBV as evidenced by the fact that they have measurable hepatitis B virus surface antigen HBsAg in their blood. The risk of becoming a chronic HBsAg carrier is dependent upon the mode of acquisition of infection as well as the age of the individual at the time of infection. For those individuals with high levels of viral replication, chronic active hepatitis with progression to cirrhosis, liver failure and hepatocellular carcinoma (HCC) is common, and liver transplantation is the only treatment option for patients with end-stage liver disease from HBV.

[0008] The natural progression of chronic HBV infection over a 10 to 20 year period leads to cirrhosis in 20-to-50% of patients and progression of HBV infection to hepatocellular carcinoma has been well documented. There have been no studies that have determined sub-populations that are most likely to progress to cirrhosis and/or hepatocellular carcinoma, thus all patients have equal risk of progression.

[0009] It is important to note that the survival for patients diagnosed with hepatocellular carcinoma is only 0.9 to 12.8 months from initial diagnosis (Takahashi et al., 1993, American Journal of Gastroenterology, 88, 240-243). Treatment of hepatocellular carcinoma with chemotherapeutic agents has not proven effective and only 10% of patients will benefit from surgery due to extensive tumor invasion of the liver (Trinchet et al., 1994,Presse Medicine, 23, 831-833). Given the aggressive nature of primary hepatocellular carcinoma, the only viable treatment alternative to surgery is liver transplantation (Pichlmayr et al., 1994, Hepatology., 20, 33S-40S).

[0010] Upon progression to cirrhosis, patients with chronic HCV infection present with clinical features, which are common to clinical cirrhosis regardless of the initial cause (D'Amico et al., 1986, Digestive Diseases and Sciences, 31, 468-475). These clinical features may include: bleeding esophageal varices, ascites, jaundice, and encephalopathy (Zakim D, Boyer TD. Hepatology a textbook of liver disease, Second Edition Volume 1. 1990 W. B. Saunders Company. Philadelphia). In the early stages of cirrhosis, patients are classified as compensated, meaning that although liver tissue damage has occurred, the patient's liver is still able to detoxify metabolites in the blood-stream. In addition, most patients with compensated liver disease are asymptomatic and the minority with symptoms report only minor symptoms such as dyspepsia and weakness. In the later stages of cirrhosis, patients are classified as decompensated meaning that their ability to detoxify metabolites in the bloodstream is diminished and it is at this stage that the clinical features described above will present.

[0011] In 1986, D'Amico et al. described the clinical manifestations and survival rates in 1155 patients with both alcoholic and viral associated cirrhosis (D'Amico supra). Of the 1155 patients, 435 (37%) had compensated disease although 70% were asymptomatic at the beginning of the study. The remaining 720 patients (63%) had decompensated liver disease with 78% presenting with a history of ascites, 31% with jaundice, 17% had bleeding and 16% had encephalopathy. Hepatocellular carcinoma was observed in six (0.5%) patients with compensated disease and in 30 (2.6%) patients with decompensated disease.

[0012] Over the course of six years, the patients with compensated cirrhosis developed clinical features of decompensated disease at a rate of 10% per year. In most cases, ascites was the first presentation of decompensation. In addition, hepatocellular carcinoma developed in 59 patients who initially presented with compensated disease by the end of the six-year study.

[0013] With respect to survival, the D'Amico study indicated that the five-year survival rate for all patients on the study was only 40%. The six-year survival rate for the patients who initially had compensated cirrhosis was 54% while the six-year survival rate for patients who initially presented with decompensated disease was only 21%. There were no significant differences in the survival rates between the patients who had alcoholic cirrhosis and the patients with viral related cirrhosis. The major causes of death for the patients in the D'Amico study were liver failure in 49%; hepatocellular carcinoma in 22%; and, bleeding in 13% (D'Amico supra).

[0014] Hepatitis B virus is a double-stranded circular DNA virus. It is a member of the Hepadnaviridae family. The virus consists of a central core that contains a core antigen (HBcAg) surrounded by an envelope containing a surface protein/surface antigen (HBsAg) and is 42 nm in diameter. It also contains an e antigen (HBeAg) which, along with HBcAg and HBsAg, is helpful in identifying this disease

[0015] In HBV virions, the genome is found in an incomplete double-stranded form. HBV uses a reverse transcriptase to transcribe a positive-sense full length RNA version of its genome back into DNA. This reverse transcriptase also contains DNA polymerase activity and thus begins replicating the newly synthesized minus-sense DNA strand. However, it appears that the core protein encapsidates the reverse-transcriptase/polymerase before it completes replication.

[0016] From the free-floating form, the virus must first attach itself specifically to a host cell membrane. Viral attachment is one of the crucial steps which determines host and tissue specificity. However, currently there are no in vitro cell-lines that can be infected by HBV. There are some cells lines, such as HepG2, which can support viral replication only upon transient or stable transfection using HBV DNA.

[0017] After attachment, fusion of the viral envelope and host membrane must occur to allow the viral core proteins containing the genome and polymerase to enter the cell. Once inside, the genome is translocated to the nucleus where it is repaired and cyclized.

[0018] The complete closed circular DNA genome of HBV remains in the nucleus and gives rise to four transcripts. These transcripts initiate at unique sites but share the same 3′-ends. The 3.5-kb pregenomic RNA serves as a template for reverse transcription and also encodes the nucleocapsid protein and polymerase. A subclass of this transcript with a 5′-end extension codes for the precore protein that, after processing, is secreted as HBV e antigen. The 2.4-kb RNA encompasses the pre-S1 open reading frame (ORF) that encodes the large surface protein. The 2.1-kb RNA encompasses the pre-S2 and S ORFs that encode the middle and small surface proteins, respectively. The smallest transcript (˜0.8-kb) codes for the X protein, a transcriptional activator.

[0019] Multiplication of the HBV genome begins within the nucleus of an infected cell. RNA polymerase II transcribes the circular HBV DNA into greater-than-full length mRNA. Since the mRNA is longer than the actual complete circular DNA, redundant ends are formed. Once produced, the pregenomic RNA exits the nucleus and enters the cytoplasm.

[0020] The packaging of pregenomic RNA into core particles is triggered by the binding of the HBV polymerase to the 5′ epsilon stem-loop. RNA encapsidation is believed to occur as soon as binding occurs. The HBV polymerase also appears to require associated core protein in order to function. The HBV polymerase initiates reverse transcription from the 5′ epsilon stem-loop three to four base pairs at which point the polymerase and attached nascent DNA are transferred to the 3′ copy of the DR1 region. Once there, the (−)DNA is extended by the HBV polymerase while the RNA template is degraded by the HBV polymerase RNAse H activity. When the HBV polymerase reaches the 5′ end, a small stretch of RNA is left undigested by the RNAse H activity. This segment of RNA is comprised of a small sequence just upstream and including the DR1 region. The RNA oligomer is then translocated and annealed to the DR2 region at the 5′ end of the (−)DNA. It is used as a primer for the (+)DNA synthesis which is also generated by the HBV polymerase. It appears that the reverse transcription as well as plus strand synthesis may occur in the completed core particle.

[0021] Since the pregenomic RNA is required as a template for DNA synthesis, this RNA is an excellent target for enzymatic nucleic acid cleavage. Nucleoside analogues that have been documented to inhibit HBV replication target the reverse transcriptase activity needed to convert the pregenomic RNA into DNA. Enzymatic nucleic acid cleavage of the pregenomic RNA template is expected to result in a similar inhibition of HBV replication. Further, targeting the 3′-end of the pregenomic RNA that is common to all HBV transcripts can result in reduction of all HBV gene products and an additional level of inhibition of HBV replication.

[0022] Cell Culture Models

[0023] As previously mentioned HBV does not infect cells in culture. However, transfection of HBV DNA (either as a head-to-tail dimer or as an “overlength” genome of >100%) into HuH7 or Hep G2 hepatocytes results in viral gene expression and production of HBV virions released into the media. Thus, HBV replication competent DNA can be co-transfected with enzymatic nucleic acids in cell culture. Such an approach has been used to report intracellular ribozyme activity against HBV (zu Putlitz, et al., 1999, J. Virol., 73, 5381-5387, and Kim et al., 1999, Biochem. Biophys. Res. Commun., 257, 759-765). In addition, stable hepatocyte cell lines have been generated that express HBV. Enzymatic nucleic acid can be delivered to these cell lines; however, such assays require the performance of a delivery screen.

[0024] Phenotypic Assays

[0025] Intracellular HBV gene expression can be assayed by a Taqman® assay for HBV RNA or by ELISA for HBV protein. Extracellular virus can be assayed by PCR for DNA or ELISA for protein. Antibodies are commercially available for HBV surface antigen and core protein. A secreted alkaline phosphatase expression plasmid can be used to normalize for differences in transfection efficiency and sample recovery.

[0026] Animal Models

[0027] There are several small animal models to study HBV replication. One is the transplantation of HBV-infected liver tissue into irradiated mice. Viremia (as evidenced by measuring HBV DNA by PCR) is first detected 8 days after transplantation and peaks between 18-25 days (Ilan et al., 1999, Hepatology, 29, 553-562).

[0028] Transgenic mice that express HBV have also been used as a model to evaluate potential anti-virals. HBV DNA is detectable in both liver and serum (Morrey et al., 1999, Antiviral Res., 42, 97-108).

[0029] An additional model is to establish subcutaneous tumors in nude mice with Hep G2 cells transfected with HBV. Tumors develop in about 2 weeks after inoculation and express HBV surface and core antigens. HBV DNA and surface antigen is also detected in the circulation of tumor-bearing mice (Yao et al., 1996, J. Viral Hepat., 3, 19-22).

[0030] Woodchuck hepatitis virus (WHV) is closely related to HBV in its virus structure, genetic organization, and mechanism of replication. As with HBV in humans, persistent WHV infection is common in natural woodchuck populations and is associated with chronic hepatitis and hepatocellular carcinoma (HCC). Experimental studies have established that WHV causes HCC in woodchucks and woodchucks chronically infected with WHV have been used as a model to test a number of anti-viral agents. For example, the nucleoside analogue 3T3 was observed to cause dose dependent reduction in virus (50% reduction after two daily treatments at the highest dose) (Hurwitz et al., 1998. Antimicrob. Agents Chemother., 42, 2804-2809).

[0031] Therapeutic Approaches

[0032] Current therapeutic goals of treatment are three-fold: to eliminate infectivity and transmission of HBV to others, to arrest the progression of liver disease and improve the clinical prognosis, and to prevent the development of hepatocellular carcinoma (HCC).

[0033] Interferon alpha use is the most common therapy for HBV; however, recently Lamivudine (3TC®) has been approved by the FDA. Interferon alpha (IFN-alpha) is one treatment for chronic hepatitis B. The standard duration of IFN-alpha therapy is 16 weeks, however, the optimal treatment length is still poorly defined. A complete response (HBV DNA negative HBeAg negative) occurs in approximately 25% of patients. Several factors have been identified that predict a favorable response to therapy including: High ALT, low HBV DNA, being female, and heterosexual orientation.

[0034] There is also a risk of reactivation of the hepatitis B virus even after a successful response, this occurs in around 5% of responders and normally occurs within 1 year.

[0035] Side effects resulting from treatment with type 1 interferons can be divided into four general categories including: Influenza-like symptoms, neuropsychiatric, laboratory abnormalities, and other miscellaneous side effects. Examples of influenza-like symptoms include, fatigue, fever; myalgia, malaise, appetite loss, tachycardia, rigors, headache and arthralgias. The influenza-like symptoms are usually short-lived and tend to abate after the first four weeks of dosing (Dusheiko et al., 1994, Journal of Viral Hepatitis, 1, 3-5). Neuropsychiatric side effects include irritability, apathy, mood changes, insomnia, cognitive changes, and depression. Laboratory abnormalities include the reduction of myeloid cells, including granulocytes, platelets and to a lesser extent, red blood cells. These changes in blood cell counts rarely lead to any significant clinical sequellae. In addition, increases in triglyceride concentrations and elevations in serum alaine and aspartate aminotransferase concentration have been observed. Finally, thyroid abnormalities have been reported. These thyroid abnormalities are usually reversible after cessation of interferon therapy and can be controlled with appropriate medication while on therapy. Miscellaneous side effects include nausea, diarrhea, abdominal and back pain, pruritus, alopecia, and rhinorrhea. In general, most side effects will abate after 4 to 8 weeks of therapy (Dushieko et al., supra ).

[0036] Lamivudine (3TC®) is a nucleoside analogue, which is a very potent and specific inhibitor of HBV DNA synthesis. Lamivudine has recently been approved for the treatment of chronic Hepatitis B. Unlike treatment with interferon, treatment with 3TC® does not eliminate the HBV from the patient. Rather, viral replication is controlled and chronic administration results in improvements in liver histology in over 50% of patients. Phase III studies with 3TC®, showed that treatment for one year was associated with reduced liver inflammation and a delay in scarring of the liver. In addition, patients treated with Lamivudine (100 mg per day) had a 98 percent reduction in hepatitis B DNA and a significantly higher rate of seroconversion, suggesting disease improvements after completion of therapy. However, stopping of therapy resulted in a reactivation of HBV replication in most patients. In addition recent reports have documented 3TC® resistance in approximately 30% of patients.

[0037] Current therapies for treating HBV infection, including interferon and nucleoside analogues, are only partially effective. In addition, drug resistance to nucleoside analogues is now emerging, making treatment of chronic Hepatitis B more difficult. Thus, a need exists for effective treatment of this disease which utilizes antiviral inhibitors which work by mechanisms other than those currently utilized in the treatment of both acute and chronic hepatitis B infections.

[0038] Draper, U.S. Pat. No. 6,017,756, describes the use of enzymatic nucleic acids for the inhibition of Hepatitis B Virus.

[0039] Passman et al, 2000, Biochem. Biophys. Res. Commun., 268(3), 728-733.; Gan et al., 1998, J. Med. Coll. PLA, 13(3), 157-159.; Li et al., 1999, Jiefangjun Yixue Zazhi, 24(2), 99-101.; Putlitz et al., 1999, J. Virol., 73(7), 5381-5387.; Kim et al., 1999, Biochem. Biophys. Res. Commun., 257(3), 759-765.; Xu et al., 1998, Bingdu Xuebao, 14(4), 365-369.; Welch et al., 1997, Gene Ther., 4(7), 736-743.; Goldenberg et al, 1997, International PCT publication No. WO 97/08309, Wands et al., 1997, J. of Gastroenterology and Hepatology, 12(suppl.), S354-S369.; Ruiz et al., 1997, BioTechniques, 22(2), 338-345.; Gan et al., 1996, J. Med. Coll. PLA, 11(3), 171-175.; Beck and Nassal, 1995, Nucleic Acids Res., 23(24), 4954-62.; Goldenberg, 1995, International PCT publication No. WO 95/22600.; Xu et al., 1993, Bingdu Xuebao, 9(4), 331-6.; Wang et al., 1993, Bingdu Xuebao, 9(3), 278-80, all describe ribozymes that are targeted to cleave a specific HBV target site.

### SUMMARY OF THE INVENTION

[0040] This invention relates to enzymatic nucleic acid molecules directed to disrupt the function of RNA species of hepatitis B virus (HBV) and/or encoded by the HBV. In particular, applicant describes the selection and function of enzymatic nucleic acid molecules capable of specifically cleaving HBV RNA. Such enzymatic nucleic acid molecules may be used to treat diseases and disorders associated with HBV infection.

[0041] In one embodiment, the invention features an enzymatic nucleic acid molecule that specifically cleaves RNA derived from hepatitis B virus (HBV), wherein the enzymatic nucleic acid molecule comprises sequence defined as Seq. ID No. 6346.

[0042] In another embodiment, the invention features a pharmaceutical composition comprising an enzymatic nucleic acid molecule of the invention in a pharmaceutically acceptable carrier.

[0043] In another embodiment, the invention features a mammalian cell, for example a human cell, including an enzymatic nucleic acid molecule contemplated by the invention.

[0044] In one embodiment, the invention features a method for treatment of cirrhosis, liver failure or hepatocellular carcinoma comprising administering to a patient an enzymatic nucleic acid molecule the invention under conditions suitable for the treatment.

[0045] In another embodiment, the invention features a method of treatment of a patient having a condition associated with HBV infection, comprising contacting cells of said patient with an enzymatic nucleic acid molecule of the invention, and further comprising the use of one or more drug therapies, for example type I interferon or 3TC® (lamivudine), under conditions suitable for said treatment. In another embodiment, the other therapy is administered simultaneously with or separately from the enzymatic nucleic acid molecule.

[0046] In another embodiment, the invention features a method for inhibiting HBV replication in a mammalian cell comprising administering to the cell an enzymatic nucleic acid molecule of the invention under conditions suitable for the inhibition.

[0047] In yet another embodiment, the invention features a method of cleaving a separate RNA molecule comprising, contacting an enzymatic nucleic acid molecule of the invention with the separate RNA molecule under conditions suitable for the cleavage of the separate RNA molecule.

[0048] In one embodiment, cleavage by an enzymatic nucleic acid molecule of the invention is carried out in the presence of a divalent cation, for example Mg2+.

[0049] In another embodiment, an enzymatic nucleic acid molecule of the invention is chemically synthesized.

[0050] In another embodiment, the type I interferon contemplated by the invention is interferon alpha, interferon beta, polyethylene glycol interferon, polyethylene glycol interferon alpha 2a, polyethylene glycol interferon alpha 2b, polyethylene glycol consensus interferon.

[0051] In one embodiment, the invention features a pharmaceutical composition comprising type I interferon and an enzymatic nucleic acid molecule of the invention, in a pharmaceutically acceptable carrier.

[0052] In another embodiment, the invention features a method of administering to a cell, for example a mammalian cell or human cell, an enzymatic nucleic acid molecule of the invention independently or in conjunction with other therapeutic compounds such as type I interferon or 3TC® (lamivudine), comprising contacting the cell with the enzymatic nucleic acid molecule under conditions suitable for the administration.

[0053] In another embodiment, administration of an enzymatic nucleic acid molecule of the invention is in the presence of a delivery reagent, for example a lipid, cationic lipid, phospholipid, or liposome.

[0054] In a preferred embodiment, the invention features novel nucleic acid-based techniques such as enzymatic nucleic acid molecules and antisense molecules and methods for their use to down regulate or inhibit the expression of HBV RNA and/or replication of HBV.

[0055] In a preferred embodiment, the invention features the use of one or more of the enzymatic nucleic acid-based techniques to inhibit the expression of the genes encoding HBV viral proteins. Specifically, the invention features the use of enzymatic nucleic acid-based techniques to specifically inhibit the expression of the HBV viral genome.

[0056] In another preferred embodiment, the invention features nucleic acid-based inhibitors (e.g., enzymatic nucleic acid molecules (ribozymes), antisense nucleic acids, triplex DNA, antisense nucleic acids containing RNA cleaving chemical groups) and methods for their use to down regulate or inhibit the expression of RNA (e.g., HBV) capable of progression and/or maintenance of hepatitis, hepatocellular carcinoma, cirrhosis, and/or liver failure.

[0057] In one embodiment, nucleic acid molecules of the invention are used to treat HBV infected cells or a HBV infected patient wherein the HBV is resistant or the patient does not respond to treatment with 3TC® (Lamivudine), either alone or in combination with other therapies under conditions suitable for the treatment.

[0058] In another embodiment, nucleic acid molecules of the invention are used to treat HBV infected cells or a HBV infected patient wherein the HBV is resistant or the patient does not respond to treatment with Interferon, for example Infergen®, either alone or in combination with other therapies under conditions suitable for the treatment.

[0059] In yet another preferred embodiment, the invention features the use of an enzymatic nucleic acid molecule, preferably in the hammerhead, NCH (Inozyme), G-cleaver, amberzyme, zinzyme, and/or DNAzyme motif, to inhibit the expression of HBV RNA.

[0060] By “inhibit” it is meant that the activity of HBV or level of RNAs or equivalent RNAs encoding one or more protein subunits of HBV is reduced below that observed in the absence of the nucleic acid. In one embodiment, inhibition with enzymatic nucleic acid molecule preferably is below that level observed in the presence of an enzymatically inactive or attenuated molecule that is able to bind to the same site on the target RNA, but is unable to cleave that RNA. In another embodiment, inhibition with antisense oligonucleotides is preferably below that level observed in the presence, of for example, an oligonucleotide with scrambled sequence or with mismatches. In another embodiment, inhibition of HBV RNA with the nucleic acid molecule of the instant invention is greater than in the presence of the nucleic acid molecule than in its absence.

[0061] These enzymatic nucleic acid molecules exhibit a high degree of specificity for only the viral mRNA in infected cells. Nucleic acid molecules of the instant invention targeted to highly conserved sequence regions allow the treatment of many strains of human HBV with a single compound. No treatment presently exists which specifically attacks expression of the viral gene(s) that are responsible for transformation of hepatocytes by HBV.

[0062] The methods of this invention can be used to treat human hepatitis B virus infections, which include productive virus infection, latent or persistent virus infection, and HBV-induced hepatocyte transformation. The utility can be extended to other species of HBV which infect non-human animals where such infections are of veterinary importance.

[0063] Preferred target sites are genes required for viral replication, a non-limiting example includes genes for protein synthesis, such as the 5′ most 1500 nucleotides of the HBV pregenomic mRNAs. For sequence references, see Renbao et al., 1987, Sci. Sin., 30, 507. This region controls the translational expression of the core protein (C), X protein (X) and DNA polymerase (P) genes and plays a role in the replication of the viral DNA by serving as a template for reverse transcriptase. Disruption of this region in the RNA results in deficient protein synthesis as well as incomplete DNA synthesis (and inhibition of transcription from the defective genomes). Target sequences 5′ of the encapsidation site can result in the inclusion of the disrupted 3′ RNA within the core virion structure and targeting sequences 3′ of the encapsidation site can result in the reduction in protein expression from both the 3′ and 5′ fragments.

[0064] Alternative regions outside of the 5′ most 1500 nucleotides of the pregenomic mRNA also make suitable targets of enzymatic nucleic acid mediated inhibition of HBV replication. Such targets include the mRNA regions that encode the viral S gene. Selection of particular target regions will depend upon the secondary structure of the pregenomic mRNA. Targets in the minor mRNAs can also be used, especially when folding or accessibility assays in these other RNAs reveal additional target sequences that are unavailable in the pregenomic mRNA species.

[0065] A desirable target in the pregenomic RNA is a proposed bipartite stem-loop structure in the 3′-end of the pregenomic RNA which is believed to be critical for viral replication (Kidd and Kidd-Ljunggren, 1996. Nuc. Acid Res. 24:3295-3302). The 5′ end of the HBV pregenomic RNA carries a cis-acting encapsidation signal, which has inverted repeat sequences that are thought to form a bipartite stem-loop structure. Due to a terminal redundancy in the pregenomic RNA, the putative stem-loop also occurs at the 3′-end. While it is the 5′ copy which functions in polymerase binding and encapsidation, reverse transcription actually begins from the 3′ stem-loop. To start reverse transcription, a 4 nt primer which is covalently attached to the polymerase is made, using a bulge in the 5′ encapsidation signal as template. This primer is then shifted, by an unknown mechanism, to the DR1 primer binding site in the 3′ stem-loop structure, and reverse transcription proceeds from that point. The 3′ stem-loop, and especially the DR1 primer binding site, appear to be highly effective targets for enzymatic nucleic acid intervention.

[0066] Sequences of the pregenomic RNA are shared by the mRNAs for surface, core, polymerase, and X proteins. Due to the overlapping nature of the HBV transcripts, all share a common 3′-end. Enzymatic nucleic acid targeting of this common 3′-end will thus cleave the pregenomic RNA as well as all of the mRNAs for surface, core, polymerase and X proteins.

[0067] By “enzymatic nucleic acid molecule” it is meant a nucleic acid molecule which has complementarity in a substrate binding region to a specified gene target, and also has an enzymatic activity which is active to specifically cleave target RNA. That is, the enzymatic nucleic acid molecule is able to intermolecularly cleave RNA and thereby inactivate a target RNA molecule. These complementary regions allow sufficient hybridization of the enzymatic nucleic acid molecule to the target RNA and thus permit cleavage. One hundred percent complementarity is preferred, but complementarity as low as 50-75% may also be useful in this invention (see for example Werner and Uhlenbeck, 1995, Nucleic Acids Research, 23, 2092-2096; Hammann et al., 1999, Antisense and Nucleic Acid Drug Dev., 9, 25-31). The nucleic acids may be modified at the base, sugar, and/or phosphate groups. The term enzymatic nucleic acid is used interchangeably with phrases such as ribozymes, catalytic RNA, enzymatic RNA, catalytic DNA, aptazyme or aptamer-binding ribozyme, regulatable ribozyme, catalytic oligonucleotides, nucleozyme, DNAzyme, RNA enzyme, endoribonuclease, endonuclease, minizyme, leadzyme, oligozyme or DNA enzyme. All of these terminologies describe nucleic acid molecules with enzymatic activity. The specific enzymatic nucleic acid molecules described in the instant application are not meant to be limiting and those skilled in the art will recognize that all that is important in an enzymatic nucleic acid molecule of this invention is that it have a specific substrate binding site which is complementary to one or more of the target nucleic acid regions, and that it have nucleotide sequences within or surrounding that substrate binding site which impart a nucleic acid cleaving activity to the molecule (Cech et al., U.S. Pat. No. 4,987,071; Cech et al., 1988, JAMA 260:20 3030-4).

[0068] By “nucleic acid molecule” as used herein is meant a molecule having nucleotides. The nucleic acid can be single, double, or multiple stranded and may comprise modified or unmodified nucleotides or non-nucleotides or various mixtures and combinations thereof.

[0069] By “enzymatic portion” or “catalytic domain” is meant that portion/region of the enzymatic nucleic acid molecule essential for cleavage of a nucleic acid substrate (for example see FIGS. 1-5).

[0070] By “substrate binding arm” or “substrate binding domain” is meant that portion/region of an enzymatic nucleic acid which is complementary to (i.e., able to base-pair with) a portion of its substrate. Generally, such complementarity is 100%, but can be less if desired. For example, as few as 10 bases out of 14 may be base-paired (see for example Werner and Uhlenbeck, 1995, Nucleic Acids Research, 23, 2092-2096; Hammann et al., 1999, Antisense and Nucleic Acid Drug Dev., 9, 25-31). Such arms are shown generally in FIGS. 1-5. That is, these arms contain sequences within an enzymatic nucleic acid which are intended to bring enzymatic nucleic acid and target RNA together through complementary base-pairing interactions. The enzymatic nucleic acid of the invention can have binding arms that are contiguous (e.g., representing a single binding arm) or non-contiguous (e.g., representing two or more binding arms) and can be of varying lengths. The length of the binding arm(s) are preferably greater than or equal to four nucleotides and of sufficient length to stably interact with the target RNA; specifically 12-100 nucleotides; more specifically 14-24 nucleotides long (see for example Werner and Uhlenbeck, supra; Hamman et al., supra; Hampel et al., EP0360257; Berzal-Herrance et al., 1993, EMBO J., 12, 2567-73). If two binding arms are chosen, the design is such that the length of the binding arms are symmetrical (i.e., each of the binding arms is of the same length; e.g., five and five nucleotides, six and six nucleotides or seven and seven nucleotides long) or asymmetrical (i.e., the binding arms are of different length; e.g., six and three nucleotides; three and six nucleotides long; four and five nucleotides long; four and six nucleotides long; four and seven nucleotides long; and the like).

[0071] By “NCH” or “Inozyme” motif is meant, an enzymatic nucleic acid molecule comprising a motif as described in Ludwig et al., U.S. Ser. No. 09/406,643, filed Sep. 27, 1999, entitled “COMPOSITIONS HAVING RNA CLEAVING ACTIVITY”, and International PCT publication Nos. WO 98/58058 and WO 98/58057, all incorporated by reference herein in their entirety, including the drawings.

[0072] By “G-cleaver” motif is meant, an enzymatic nucleic acid molecule comprising a motif as described in Eckstein et al., International PCT publication No. WO 99/16871, incorporated by reference herein in its entirety, including the drawings.

[0073] By “zinzyme” motif is meant, a class II enzymatic nucleic acid molecule comprising a motif as described in Beigelman et al., International PCT publication No. WO 99/55857, incorporated by reference herein in its entirety, including the drawings.

[0074] By “amberzyme” motif is meant, a class I enzymatic nucleic acid molecule comprising a motif as described in Beigelman et al., International PCT publication No. WO 99/55857, incorporated by reference herein in its entirety, including the drawings.

[0075] By ‘DNAzyme’ is meant, an enzymatic nucleic acid molecule lacking a ribonucleotide (2′-OH) group or an enzymatic nucleic acid molecule that does not require the presence of a ribonucleotide (2′-OH) group in the molecule for its activity. In particular embodiments, the enzymatic nucleic acid molecule may have an attached linker(s) or other attached or associated groups, moieties, or chains containing one or more nucleotides with 2′-OH groups. A DNAzyme can be synthesized chemically or can be expressed by means of a single stranded DNA vector or equivalent thereof.

[0076] By “sufficient length” is meant an oligonucleotide of greater than or equal to 3 nucleotides that is of a length great enough to provide the intended function under the expected condition. For example, for binding arms of enzymatic nucleic acid “sufficient length” means that the binding arm sequence is long enough to provide stable binding to a target site under the expected binding conditions. Preferably, the binding arms are not so long as to prevent useful turnover.

[0077] By “stably interact” is meant, interaction of the oligonucleotides with target nucleic acid (e.g., by forming hydrogen bonds with complementary nucleotides in the target under physiological conditions).

[0078] By “equivalent” RNA to HBV is meant to include those naturally occurring RNA molecules having homology (partial or complete) to HBV proteins or encoding for proteins with similar function as HBV in various organisms, including human, rodent, primate, rabbit, pig, protozoans, fungi, plants, and other microorganisms and parasites. The equivalent RNA sequence also includes in addition to the coding region, regions such as 5′-untranslated region, 3′-untranslated region, introns, intron-exon junction and the like.

[0079] By “homology” is meant the nucleotide sequence of two or more nucleic acid molecules is partially or completely identical.

[0080] By “antisense nucleic acid”, it is meant a non-enzymatic nucleic acid molecule that binds to target RNA by means of RNA-RNA or RNA-DNA or RNA-PNA (protein nucleic acid; Egholm et al., 1993 Nature 365, 566) interactions and alters the activity of the target RNA (for a review, see Stein and Cheng, 1993 Science 261, 1004 and Woolf et al, U.S. Pat. No. 5,849,902). Typically, antisense molecules will be complementary to a target sequence along a single contiguous sequence of the antisense molecule. However, in certain embodiments, an antisense molecule may bind to substrate such that the substrate molecule forms a loop, and/or an antisense molecule may bind such that the antisense molecule forms a loop. Thus, the antisense molecule may be complementary to two (or even more) non-contiguous substrate sequences or two (or even more) non-contiguous sequence portions of an antisense molecule may be complementary to a target sequence or both. For a review of current antisense strategies, see Schmajuk et al., 1999, J. Biol. Chem., 274, 21783-21789, Delihas et al., 1997, Nature, 15, 751-753, Stein et al., 1997, Antisense N. A. Drug Dev., 7, 151, Crooke, 1998, Biotech. Genet. Eng. Rev., 15, 121-157, Crooke, 1997, Ad. Pharmacol., 40, 1-49. In addition, antisense DNA can be used to target RNA by means of DNA-RNA interactions, thereby activating RNase H, which digests the target RNA in the duplex. The antisense oligonucleotides can comprise one or more RNAse H activating region, which is capable of activating RNAse H cleavage of a target RNA. Antisense DNA can be synthesized chemically or expressed via the use of a single stranded DNA expression vector or equivalent thereof.

[0081] By “RNase H activating region” is meant a region (generally greater than or equal to 4-25 nucleotides in length, preferably from 5-11 nucleotides in length) of a nucleic acid molecule capable of binding to a target RNA to form a non-covalent complex that is recognized by cellular RNase H enzyme (see for example Arrow et al., U.S. Pat. No. 5,849,902; Arrow et al., U.S. Pat. No. 5,989,912). The RNase H enzyme binds to the nucleic acid molecule-target RNA complex and cleaves the target RNA sequence. The RNase H activating region comprises, for example, phosphodiester, phosphorothioate (preferably at least four of the nucleotides are phosphorothiote substitutions; more specifically, 4-11 of the nucleotides are phosphorothiote substitutions); phosphorodithioate, 5′-thiophosphate, or methylphosphonate backbone chemistry or a combination thereof. In addition to one or more backbone chemistries described above, the RNase H activating region can also comprise a variety of sugar chemistries. For example, the RNase H activating region can comprise deoxyribose, arabino, fluoroarabino or a combination thereof, nucleotide sugar chemistry. Those skilled in the art will recognize that the foregoing are non-limiting examples and that any combination of phosphate, sugar and base chemistry of a nucleic acid that supports the activity of RNase H enzyme is within the scope of the definition of the RNase H activating region and the instant invention.

[0082] By “2-5A antisense chimera” it is meant, an antisense oligonucleotide containing a 5′-phosphorylated 2′-5′-linked adenylate residue. These chimeras bind to target RNA in a sequence-specific manner and activate a cellular 2-5A-dependent ribonuclease which, in turn, cleaves the target RNA (Torrence et al, 1993 Proc. Natl. Acad. Sci. USA 90, 1300).

[0083] By “triplex DNA” it is meant an oligonucleotide that can bind to a double-stranded DNA in a sequence-specific manner to form a triple-strand helix. Formation of such triple helix structure has been shown to inhibit transcription of the targeted gene (Duval-Valentin et al., 1992, Proc. Natl. Acad. Sci. USA, 89, 504).

[0084] By “gene” it is meant a nucleic acid that encodes an RNA.

[0085] By “complementarity” is meant that a nucleic acid can form hydrogen bond(s) with another RNA sequence by either traditional Watson-Crick or other non-traditional types. In reference to the nucleic molecules of the present invention, the binding free energy for a nucleic acid molecule with its target or complementary sequence is sufficient to allow the relevant function of the nucleic acid to proceed, e.g., enzymatic nucleic acid cleavage, antisense or triple helix inhibition. Determination of binding free energies for nucleic acid molecules is well known in the art (see, e.g., Turner et al., 1987, CSH Symp. Quant. Biol. LII pp.123-133; Frier et al., 1986, Proc. Nat. Acad. Sci. USA 83:9373-9377; Turner et al., 1987, J. Am. Chem. Soc. 109:3783-3785). A percent complementarity indicates the percentage of contiguous residues in a nucleic acid molecule which can form hydrogen bonds (e.g., Watson-Crick base pairing) with a second nucleic acid sequence (e.g., 5, 6, 7, 8, 9, 10 out of 10 being 50%, 60%, 70%, 80%, 90%, and 100% complementary). “Perfectly complementary” means that all the contiguous residues of a nucleic acid sequence will hydrogen bond with the same number of contiguous residues in a second nucleic acid sequence.

[0086] At least seven basic varieties of naturally-occurring enzymatic RNAs are known presently. Each can catalyze the hydrolysis of RNA phosphodiester bonds in trans (and thus can cleave other RNA molecules) under physiological conditions. Table I summarizes some of the characteristics of these enzymatic nucleic acids. In general, enzymatic nucleic acids act by first binding to a target RNA. Such binding occurs through the target binding portion of a enzymatic nucleic acid which is held in close proximity to an enzymatic portion of the molecule that acts to cleave the target RNA. Thus, the enzymatic nucleic acid first recognizes and then binds a target RNA through complementary base-pairing, and once bound to the correct site, acts enzymatically to cut the target RNA. Strategic cleavage of such a target RNA will destroy its ability to direct synthesis of an encoded protein. After an enzymatic nucleic acid has bound and cleaved its RNA target, it is released from that RNA to search for another target and can repeatedly bind and cleave new targets. Thus, a single enzymatic nucleic acid molecule is able to cleave many molecules of target RNA. In addition, the enzymatic nucleic acid is a highly specific inhibitor of gene expression, with the specificity of inhibition depending not only on the base-pairing mechanism of binding to the target RNA, but also on the mechanism of target RNA cleavage. Single mismatches, or base-substitutions, near the site of cleavage can completely eliminate catalytic activity of a enzymatic nucleic acid.

[0087] The enzymatic nucleic acid molecule that cleave the specified sites in HBV-specific RNAs represent a novel therapeutic approach to treat a variety of pathologic indications, including, HBV infection, hepatitis, hepatocellular carcinoma, tumorigenesis, cirrhosis, liver failure and others.

[0088] In one of the preferred embodiments of the inventions described herein, the enzymatic nucleic acid molecule is formed in a hammerhead or hairpin motif, but may also be formed in the motif of a hepatitis delta virus, group I intron, group II intron or RNase P RNA (in association with an RNA guide sequence), Neurospora VS RNA, DNAzymes, NCH cleaving motifs, or G-cleavers. Examples of such hammerhead motifs are described by Dreyfus, supra, Rossi et al., 1992, AIDS Research and Human Retroviruses 8, 183. Examples of hairpin motifs are described by Hampel et al., EP0360257, Hampel and Tritz, 1989 Biochemistry 28, 4929, Feldstein et al., 1989, Gene 82, 53, Haseloff and Gerlach, 1989, Gene, 82, 43, Hampel et al., 1990 Nucleic Acids Res. 18, 299; and Chowrira & McSwiggen, U.S. Pat. No. 5,631,359. The hepatitis delta virus motif is described by Perrotta and Been, 1992 Biochemistry 31, 16. The RNase P motif is described by Guerrier-Takada et al., 1983 Cell 35, 849; Forster and Altman, 1990, Science 249, 783; and Li and Altman, 1996, Nucleic Acids Res. 24, 835. The Neurospora VS RNA ribozyme motif is described by Collins (Saville and Collins, 1990 Cell 61, 685-696; Saville and Collins, 1991 Proc. Natl. Acad. Sci. USA 88, 8826-8830; Collins and Olive, 1993 Biochemistry 32, 2795-2799; and Guo and Collins, 1995, EMBO. J. 14, 363). Group II introns are described by Griffin et al., 1995, Chem. Biol. 2, 761; Michels and Pyle, 1995, Biochemistry 34, 2965; and Pyle et al., International PCT Publication No. WO 96/22689. The Group I intron is described by Cech et al., U.S. Pat. No. 4,987,071. DNAzymes are described by Usman et al., International PCT Publication No. WO 95/11304; Chartrand et al., 1995, NAR 23, 4092; Breaker et al., 1995, Chem. Bio. 2, 655; and Santoro et al., 1997, PNAS 94, 4262. NCH cleaving motifs are described in Ludwig & Sproat, International PCT Publication No. WO 98/58058; and G-cleavers are described in Kore et al., 1998, Nucleic Acids Research 26, 4116-4120 and Eckstein et al., International PCT Publication No. WO 99/16871. Additional motifs include the Aptazyme (Breaker et al., WO 98/43993), Amberzyme (Class I motif; FIG. 3; Beigelman et al., International PCT publication No. WO 99/55857) and Zinzyme (Beigelman et al., International PCT publication No. WO 99/55857), all these references are incorporated by reference herein in their totalities, including drawings and can also be used in the present invention. These specific motifs are not limiting in the invention. and those skilled in the art will recognize that all that is important in an enzymatic nucleic acid molecule of this invention is that it has a specific substrate binding site which is complementary to one or more of the target gene RNA regions, and that it have nucleotide sequences within or surrounding that substrate binding site which impart an RNA cleaving activity to the molecule (Cech et al., U.S. Pat. No. 4,987,071).

[0089] In preferred embodiments of the present invention, a nucleic acid molecule, e.g., an antisense molecule, a triplex DNA, or an enzymatic nucleic acid, is 13 to 100 nucleotides in length, e.g., in specific embodiments 35, 36, 37, or 38 nucleotides in length (e.g., for particular enzymatic nucleic acids or antisense). In particular embodiments, the nucleic acid molecule is 15-100, 17-100, 20-100, 21-100, 23-100, 25-100, 27-100, 30-100, 32-100, 35-100, 40-100, 50-100, 60-100, 70-100, or 80-100 nucleotides in length. Instead of 100 nucleotides being the upper limit on the length ranges specified above, the upper limit of the length range can be, for example, 30, 40, 50, 60, 70, or 80 nucleotides. Thus, for any of the length ranges, the length range for particular embodiments has lower limit as specified, with an upper limit as specified which is greater than the lower limit. For example, in a particular embodiment, the length range can be 35-50 nucleotides in length. All such ranges are expressly included. Also in particular embodiments, a nucleic acid molecule can have a length which is any of the lengths specified above, for example, 21 nucleotides in length.

[0090] Exemplary enzymatic nucleic acid molecules of the invention are shown in Tables V-XI. For example, enzymatic nucleic acid molecules of the invention are preferably between 15 and 50 nucleotides in length, more preferably between 25 and 40 nucleotides in length, e.g., 34, 36, or 38 nucleotides in length (for example see Jarvis et al., 1996, J. Biol. Chem., 271, 29107-29112). Exemplary DNAzymes of the invention are preferably between 15 and 40 nucleotides in length, more preferably between 25 and 35 nucleotides in length, e.g., 29, 30, 31, or 32 nucleotides in length (see for example Santoro et al., 1998, Biochemistry, 37, 13330-13342; Chartrand et al., 1995, Nucleic Acids Research, 23, 4092-4096). Exemplary antisense molecules of the invention are preferably between 15 and 75 nucleotides in length, more preferably between 20 and 35 nucleotides in length, e.g., 25, 26, 27, or 28 nucleotides in length (see for example Woolf et al., 1992, PNAS., 89, 7305-7309; Milner et al., 1997, Nature Biotechnology, 15, 537-541). Exemplary triplex forming oligonucleotide molecules of the invention are preferably between 10 and 40 nucleotides in length, more preferably between 12 and 25 nucleotides in length, e.g., 18, 19, 20, or 21 nucleotides in length (see for example Maher et al., 1990, Biochemistry, 29, 8820-8826; Strobel and Dervan, 1990, Science, 249, 73-75). Those skilled in the art will recognize that all that is required is for the nucleic acid molecule are of length and conformation sufficient and suitable for the nucleic acid molecule to catalyze a reaction contemplated herein. The length of the nucleic acid molecules of the instant invention are not limiting within the general limits stated.

[0091] In a preferred embodiment, the invention provides a method for producing a class of nucleic acid-based gene inhibiting agents which exhibit a high degree of specificity for the RNA of a desired target. For example, the enzymatic nucleic acid molecule is preferably targeted to a highly conserved sequence region of target RNAs encoding HBV proteins (specifically HBV RNA) such that specific treatment of a disease or condition can be provided with either one or several nucleic acid molecules of the invention. Such nucleic acid molecules can be delivered exogenously to specific tissue or cellular targets as required. Alternatively, the nucleic acid molecules (e.g., enzymatic nucleic acids and antisense) can be expressed from DNA and/or RNA vectors that are delivered to specific cells.

[0092] As used in herein “cell” is used in its usual biological sense, and does not refer to an entire multicellular organism, e.g., specifically does not refer to a human. The cell may be present in an organism which may be a human but is preferably a non-human multicellular organism, e.g., birds, plants and mammals such as cows, sheep, apes, monkeys, swine, dogs, and cats. The cell may be prokaryotic (e.g., bacterial cell) or eukaryotic (e.g., mammalian or plant cell).

[0093] By “HBV proteins” is meant, a protein or a mutant protein derivative thereof, comprising sequence expressed and/or encoded by the HBV genome.

[0094] By “highly conserved sequence region” is meant a nucleotide sequence of one or more regions in a target gene does not vary significantly from one generation to the other or from one biological system to the other.

[0095] The enzymatic nucleic acid-based inhibitors of HBV expression are useful for the prevention of the diseases and conditions including HBV infection, hepatitis, cancer, cirrhosis, liver failure, and any other diseases or conditions that are related to the levels of HBV in a cell or tissue.

[0096] By “related” is meant that the reduction of HBV expression (specifically HBV gene) RNA levels and thus reduction in the level of the respective protein will relieve, to some extent, the symptoms of the disease or condition.

[0097] The nucleic acid-based inhibitors of the invention are added directly, or can be complexed with cationic lipids, packaged within liposomes, or otherwise delivered to target cells or tissues. The nucleic acid or nucleic acid complexes can be locally administered to relevant tissues ex vivo, or in vivo through injection, infusion pump or stent, with or without their incorporation in biopolymers. In preferred embodiments, the enzymatic nucleic acid inhibitors comprise sequences, which are complementary to the substrate sequences in Tables IV to XI. Examples of such enzymatic nucleic acid molecules also are shown in Tables V to XI. Examples of such enzymatic nucleic acid molecules consist essentially of sequences defined in these tables.

[0098] In yet another embodiment, the invention features antisense nucleic acid molecules including sequences complementary to the substrate sequences shown in Tables IV to XI. Such nucleic acid molecules can include sequences as shown for the binding arms of the enzymatic nucleic acid molecules in Tables V to XI. Similarly, triplex molecules can be provided targeted to the corresponding DNA target regions, and containing the DNA equivalent of a target sequence or a sequence complementary to the specified target (substrate) sequence. Typically, antisense molecules will be complementary to a target sequence along a single contiguous sequence of the antisense molecule. However, in certain embodiments, an antisense molecule may bind to substrate such that the substrate molecule forms a loop, and/or an antisense molecule may bind such that the antisense molecule forms a loop. Thus, the antisense molecule may be complementary to two (or even more) non-contiguous substrate sequences or two (or even more) non-contiguous sequence portions of an antisense molecule may be complementary to a target sequence or both.

[0099] In another aspect, the invention provides mammalian cells containing one or more nucleic acid molecules and/or expression vectors of this invention. The one or more nucleic acid molecules may independently be targeted to the same or different sites.

[0100] By “consists essentially of” is meant that the active nucleic acid molecule of the invention, for example, an enzymatic nucleic acid molecule, contains an enzymatic center or core equivalent to those in the examples, and binding arms able to bind RNA such that cleavage at the target site occurs. Other sequences can be present which do not interfere with such cleavage. Thus, a core region can, for example, include one or more loop, stem-loop structure, or linker which does not prevent enzymatic activity. Thus, the underlined regions in the sequences in Tables V and VI can be such a loop, stem-loop, nucleotide linker, and/or non-nucleotide linker and can be represented generally as sequence “X”. For example, a core sequence for a hammerhead enzymatic nucleic acid can comprise a conserved sequence, such as 5′-CUGAUGAG-3′ and 5′-CGAA-3′ connected by “X”, where X is 5′-GCCGUUAGGC-3′ (SEQ ID NO 6586), or any other Stem II region known in the art, or a nucleotide and/or non-nucleotide linker. Similarly, for other nucleic acid molecules of the instant invention, such as Inozyme, G-cleaver, amberzyme, zinzyme, DNAzyme, antisense, 2-5A antisense, triplex forming nucleic acid, and decoy nucleic acids, other sequences or non-nucleotide linkers can be present that do not interfere with the function of the nucleic acid molecule.

[0101] In another aspect of the invention, enzymatic nucleic acids or antisense molecules that interact with target RNA molecules and inhibit HBV (specifically HBV RNA) activity are expressed from transcription units inserted into DNA or RNA vectors. The recombinant vectors are preferably DNA plasmids or viral vectors. Enzymatic nucleic acid or antisense expressing viral vectors could be constructed based on, but not limited to, adeno-associated virus, retrovirus, adenovirus, or alphavirus. Preferably, the recombinant vectors capable of expressing the enzymatic nucleic acids or antisense are delivered as described above, and persist in target cells. Alternatively, viral vectors may be used that provide for transient expression of enzymatic nucleic acids or antisense. Such vectors might be repeatedly administered as necessary. Once expressed, the enzymatic nucleic acids or antisense bind to the target RNA and inhibit its function or expression. Delivery of enzymatic nucleic acid or antisense expressing vectors could be systemic, such as by intravenous or intramuscular administration, by administration to target cells ex-planted from the patient followed by reintroduction into the patient, or by any other means that would allow for introduction into the desired target cell. Antisense DNA can be expressed via the use of a single stranded DNA intracellular expression vector.

[0102] By RNA is meant a molecule comprising at least one ribonucleotide residue. By “ribonucleotide” is meant a nucleotide with a hydroxyl group at the 2′ position of a β-D-ribofuranose moiety.

[0103] By “vectors” is meant any nucleic acid- and/or viral-based technique used to deliver a desired nucleic acid.

[0104] By “patient” is meant an organism, which is a donor or recipient of explanted cells or the cells themselves. “Patient” also refers to an organism to which the nucleic acid molecules of the invention can be administered. Preferably, a patient is a mammal or mammalian cells. More preferably, a patient is a human or human cells.

[0105] The nucleic acid molecules of the instant invention, individually, or in combination or in conjunction with other drugs, can be used to treat diseases or conditions discussed above. For example, to treat a disease or condition associated with HBV, the patient may be treated, or other appropriate cells may be treated, as is evident to those skilled in the art, individually or in combination with one or more drugs under conditions suitable for the treatment.

[0106] In a further embodiment, the described molecules, such as antisense or enzymatic nucleic acids, can be used in combination with other known treatments to treat conditions or diseases discussed above. For example, the described molecules could be used in combination with one or more known therapeutic agents to treat HBV infection, hepatitis, hepatocellular carcinoma, cancer, cirrhosis, and liver failure. Such therapeutic agents may include, but are not limited to nucleoside analogs selected from the group comprising Lamivudine (3TC®), L-FMAU, and/or adefovir dipivoxil (for a review of applicable nucleoside analogs, see Colacino and Staschke, 1998, Progress in Drug Research, 50, 259-322). Immunomodulators selected from the group comprising Type 1 Interferon, Therapeutic vaccines, steriods, and 2′-5′ oligoadenylates (for a review of 2′-5′ Oligoadenylates, see Charubala and Pfleiderer, 1994, Progress in Molecular and Subcellular Biology, 14, 113-138).

[0107] In another preferred embodiment, the invention features nucleic acid-based inhibitors (e.g., enzymatic nucleic acid molecules (ribozymes), antisense nucleic acids, triplex DNA, antisense nucleic acids containing RNA cleaving chemical groups) and methods for their use to down regulate or inhibit the expression of RNA (e.g., HBV) capable of progression and/or maintenance of liver disease and failure.

[0108] In another preferred embodiment, the invention features nucleic acid-based techniques (e.g., enzymatic nucleic acid molecules (ribozymes), antisense nucleic acids, triplex DNA, antisense nucleic acids containing RNA cleaving chemical groups) and methods for their use to down regulate or inhibit the expression of HBV RNA expression.

[0109] In preferred embodiments, the invention features a method for the analysis of HBV proteins. This method is useful in determining the efficacy of HBV inhibitors. Specifically, the instant invention features an assay for the analysis of HBsAg proteins and secreted alkaline phosphatase (SEAP) control proteins to determine the efficacy of agents used to modulate HBV expression.

[0110] The method consists of coating a micro-titer plate with an antibody such as anti-HBsAg Mab (for example, Biostride B88-95-31ad,ay) at 0.1 to 10 μg/ml in a buffer (for example, carbonate buffer, such as Na₂CO₃ 15 mM, NaHCO₃ 35 mM, pH 9.5) at 4° C. overnight. The microtiter wells are then washed with PBST or the equivalent thereof, (for example, PBS, 0.05% Tween 20) and blocked for 0.1-24 hr at 37° C. with PBST, 1% BSA or the equivalent thereof. Following washing as above, the wells are dried (for example, at 37° C. for 30 min). Biotinylated goat anti-HBsAg or an equivalent antibody (for example, Accurate YVS1807) is diluted (for example at 1:1000) in PBST and incubated in the wells (for example, 1 hr. at 37° C.). The wells are washed with PBST (for example, 4×). A conjugate, (for example, Streptavidin/Alkaline Phosphatase Conjugate, Pierce 21324) is diluted to 10-10,000 ng/ml in PBST, and incubated in the wells (for example, 1 hr. at 37° C.). After washing as above, a substrate (for example, p-nitrophenyl phosphate substrate, Pierce 37620) is added to the wells, which are then incubated (for example, 1 hr. at 37° C.). The optical density is then determined (for example, at 405 nm). SEAP levels are then assayed, for example, using the Great EscAPe® Detection Kit (Clontech K2041-1), as per the manufacturers instructions. In the above example, incubation times and reagent concentrations may be varied to achieve optimum results, a non-limiting example is described in Example 6.

[0111] Comparison of this HBsAg ELISA method to a commercially available assay from World Diagnostics, Inc. 15271 NW 60^{th} Ave, #201, Miami Lakes, Fla. 33014 (305) 827-3304 (Cat. No. EL10018) demonstrates an increase in sensitivity (signal:noise) of 3-20 fold.

[0112] Other features and advantages of the invention will be apparent from the following description of the preferred embodiments thereof, and from the claims.

### BRIEF DESCRIPTION OF THE DRAWINGS

[0113] FIG. 1 shows the secondary structure model for seven different classes of enzymatic nucleic acid molecules. Arrow indicates the site of cleavage. --------- indicate the target sequence. Lines interspersed with dots are meant to indicate tertiary interactions. - is meant to indicate base-paired interaction. Group I Intron: P1-P9.0 represent various stem-loop structures (Cech et al., 1994, Nature Struc. Bio., 1, 273). RNase P (M1RNA): EGS represents external guide sequence (Forster et al., 1990, Science, 249, 783; Pace et al., 1990, J. Biol. Chem., 265, 3587). Group II Intron: 5′SS means 5′ splice site; 3′SS means 3′-splice site; IBS means intron binding site; EBS means exon binding site (Pyle et al., 1994, Biochemistry, 33, 2716). VS RNA: I-VI are meant to indicate six stem-loop structures; shaded regions are meant to indicate tertiary interaction (Collins, International PCT Publication No. WO 96/19577). HDV Ribozyme: I-IV are meant to indicate four stem-loop structures (Been et al, U.S. Pat. No. 5,625,047). Hammerhead Ribozyme: I-III are meant to indicate three stem-loop structures; stems I-III can be of any length and may be symmetrical or asymmetrical (Usman et al., 1996, Curr. Op. Struct. Bio., 1, 527). Hairpin Ribozyme: Helix 1, 4 and 5 can be of any length; Helix 2 is between 3 and 8 base-pairs long; Y is a pyrimidine; Helix 2 (H2) is provided with a least 4 base pairs (i.e., n is 1, 2, 3 or 4) and helix 5 can be optionally provided of length 2 or more bases (preferably 3-20 bases, i.e., m is from 1-20 or more). Helix 2 and helix 5 may be covalently linked by one or more bases (i.e., r is ≧1 base). Helix 1, 4 or 5 may also be extended by 2 or more base pairs (e.g., 4-20 base pairs) to stabilize the ribozyme structure, and preferably is a protein binding site. In each instance, each N and N′ independently is any normal or modified base and each dash represents a potential base-pairing interaction. These nucleotides may be modified at the sugar, base or phosphate. Complete base-pairing is not required in the helices, but is preferred. Helix 1 and 4 can be of any size (i.e., o and p is each independently from 0 to any number, e.g., 20) as long as some base-pairing is maintained. Essential bases are shown as specific bases in the structure, but those in the art will recognize that one or more may be modified chemically (abasic, base, sugar and/or phosphate modifications) or replaced with another base without significant effect. Helix 4 can be formed from two separate molecules, i.e., without a connecting loop. The connecting loop when present may be a ribonucleotide with or without modifications to its base, sugar or phosphate. “q”≧is 2 bases. The connecting loop can also be replaced with a non-nucleotide linker molecule. H refers to bases A, U, or C. Y refers to pyrimidine bases. “_{—————}” refers to a covalent bond. (Burke et al., 1996, Nucleic Acids & Mol. Biol., 10, 129; Chowrira et al., U.S. Pat. No. 5,631,359).

[0114] FIG. 2 shows examples of chemically stabilized enzymatic nucleic acid motifs. HH Rz, represents hammerhead ribozyme motif (Usman et al., 1996, Curr. Op. Struct. Bio., 1, 527); NCH Rz represents the NCH ribozyme motif (Ludwig & Sproat, International PCT Publication No. WO 98/58058); G-Cleaver, represents G-cleaver ribozyme motif (Kore et al., 1998, Nucleic Acids Research, 26, 4116-4120). N or n, represent independently a nucleotide which may be same or different and have complementarity to each other; rI, represents ribo-Inosine nucleotide; arrow indicates the site of cleavage within the target. Position 4 of the HH Rz and the NCH Rz is shown as having 2′-C-allyl modification, but those skilled in the art will recognize that this position can be modified with other modifications well known in the art, so long as such modifications do not significantly inhibit the activity of the ribozyme.

[0115] FIG. 3 shows an example of the Amberzyme enzymatic nucleic acid motif that is chemically stabilized (see, for example, Beigelman et al., International PCT publication No. WO 99/55857; also referred to as Class I Motif). The Amberzyme motif is a class of enzymatic nucleic acid molecules that do not require the presence of a ribonucleotide (2′-OH) group for activity.

[0116] FIG. 4 shows an example of the Zinzyme A enzymatic nucleic acid motif that is chemically stabilized (see, for example, International PCT publication No. WO 99/55857; also referred to as Class A Motif). The Zinzyme motif is a class of enzymatic nucleic acid molecules that do not require the presence of a ribonucleotide (2′-OH) group for activity.

[0117] FIG. 5 shows an example of a DNAzyme motif described by Santoro et al., 1997, PNAS, 94, 4262.

[0118] FIG. 6 is a bar graph showing the percent change in serum HBV DNA levels following fourteen days of enzymatic nucleic acid treatment in HBV transgenic mice. Enzymatic nucleic acids targeting sites 273 (RPI.18341) and 1833 (RPI.18371) of HBV RNA administerd via continuous s.c. infusion at 10, 30, and 100 mg/kg/day are compared to continuous s.c. infusion administration of scrambled attenuated core enzymatic nucleic acid and saline controls, and orally administered 3TC® (300 mg/kg/day) and saline controls.

[0119] FIG. 7 is a bar graph showing the mean serum HBV DNA levels following fourteen days of enzymatic nucleic acid treatment in HBV transgenic mice. Enzymatic nucleic acids targeting sites 273 (RPI.18341) and 1833 (RPI.18371) of HBV RNA administerd via continuous s.c. infusion at 10, 30, and 100 mg/kg/day are compared to continuous s.c. infusion administration of scrambled attenuated core enzymatic nucleic acid and saline controls, and orally administered 3TC® (300 mg/kg/day) and saline controls.

[0120] FIG. 8 is a bar graph showing the decrease in serum HBV DNA (log) levels following fourteen days of enzymatic nucleic acid treatment in HBV transgenic mice. Enzymatic nucleic acids targeting sites 273 (RPI.18341) and 1833 (RPI.18371) of HBV RNA administerd via continuous s.c. infusion at 10, 30, and 100 mg/kg/day are compared to continuous s.c. infusion administration of scrambled attenuated core enzymatic nucleic acid and saline controls, and orally administered 3TC® (300 mg/kg/day) and saline controls.

[0121] FIG. 9 is a bar graph showing the decrease in HBV DNA in HepG2.2.15 cells after treatment with enzymatic nucleic acids targeting sites 273 (RPI.18341), 1833 (RPI.18371), 1874 (RPI.18372), and 1873 (RPI.18418) of HBV RNA as compared to a scrambled attenuated core enzymatic nucleic acid (RPI.20995).

[0122] FIG. 10 is a bar graph showing reduction in HBsAg levels following treatment of HepG2 cells with anti-HBV arm, stem, and loop-variant enzymatic nucleic acids (RPI.18341, RPI.22644, RPI.22645, RPI.22646, RPI.22647, RPI.22648, RPI.22649, and RPI.22650) targeting site 273 of the HBV pregenomic RNA as compared to a scrambled attenuated core enzymatic nucleic acid (RPI.20599).

[0123] FIG. 11 is a bar graph showing reduction in HBsAg levels following treatment of HepG2 cells with RPI 18341 alone or in combination with Infergen®. At either 500 or 1000 units of Infergen®, the addition of 200 nM of RPI.18341 results in a 75-77% increase in anti-HBV activity as judged by the level of HBsAg secreted from the treated Hep G2 cells. Conversely, the anti-HBV activity of RPI.18341(at 200 nM) is increased 31-39% when used in combination of 500 or 1000 units of Infergen®.

[0124] FIG. 12 is a bar graph showing reduction in HBsAg levels following treatment of HepG2 cells with RPI 18341 alone or in combination with Lamivudine. At 25 nM Lamivudine (3TC®), the addition of 100 nM of RPI.18341 results in a 48% increase in anti-HBV activity as judged by the level of HBsAg secreted from treated Hep G2 cells. Conversely, the anti-HBV activity of RPI.18341 (at 100 nM) is increased 31% when used in combination with 25 nM Lamivudine.

[0125] FIG. 13 is a bar graph showing reduction of HBsAg levels following treatment of HepG2 cells with RPI 18341 (at 125 nM) in HepG2 cells expressing wild-type HBV and HepG2-DM2 cells expressing lamividine resistant HBV.

[0126] FIG. 14 shows a non-limiting example of an enzymatic nucleic acid molecule of the invention lacking ribonucleotides. FIG. 15 shows a bar graph comparing the activity of a “no-ribo” enzymatic nucleic acid molecule (RPI 25516) to matched binding attenuated (BAC, RPI 25535) and scrambled attenuated (SAC, RPI 25536) controls, and to an enzymatic nucleic acid molecule having 5 ribonucleotides (RPI 18341) and its matched scrambed attenuated control (RPI 24588) in a HBsAg assay. The concentration of all nucleic acid molecules is 200 nM.

### DETAILED DESCRIPTION OF THE INVENTION

[0127] Mechanism of Action of Nucleic Acid Molecules of the Invention

[0128] Antisense: Antisense molecules may be modified or unmodified RNA, DNA, or mixed polymer oligonucleotides and primarily function by specifically binding to matching sequences resulting in inhibition of peptide synthesis (Wu-Pong, November 1994, BioPharm, 20-33). The antisense oligonucleotide binds to target RNA by Watson Crick base-pairing and blocks gene expression by preventing ribosomal translation of the bound sequences either by steric blocking or by activating RNase H enzyme. Antisense molecules may also alter protein synthesis by interfering with RNA processing or transport from the nucleus into the cytoplasm (Mukhopadhyay & Roth, 1996, Crit. Rev. in Oncogenesis 7, 151-190).

[0129] In addition, binding of single stranded DNA to RNA may result in nuclease degradation of the heteroduplex (Wu-Pong, supra; Crooke, supra). To date, the only backbone modified DNA chemistry which will act as substrates for RNase H are phosphorothioates, phosphorodithioates, and borontrifluoridates. Recently, it has been reported that 2′-arabino and 2′-fluoro arabino-containing oligos can also activate RNase H activity.

[0130] A number of antisense molecules have been described that utilize novel configurations of chemically modified nucleotides, secondary structure, and/or RNase H substrate domains (Woolf et al., International PCT Publication No. WO 98/13526; Thompson et al., U.S. Ser. No. 60/082,404 which was filed on Apr. 20, 1998; Hartmann et al., U.S. Ser. No. 60/101,174 which was filed on Sep. 21, 1998) all of these are incorporated by reference herein in their entirety.

[0131] Antisense DNA can be used to target RNA by means of DNA-RNA interactions, thereby activating RNase H, which digests the target RNA in the duplex. Antisense DNA can be chemically synthesized or can be expressed via the use of a single stranded DNA intracellular expression vector or the equivalent thereof.

[0132] Triplex Forming Oligonucleotides (TFO): Single stranded DNA may be designed to bind to genomic DNA in a sequence specific manner. TFOs are comprised of pyrimidine-rich oligonucleotides which bind DNA helices through Hoogsteen Base-pairing (Wu-Pong, supra). The resulting triple helix composed of the DNA sense, DNA antisense, and TFO disrupts RNA synthesis by RNA polymerase. The TFO mechanism may result in gene expression or cell death since binding may be irreversible (Mukhopadhyay & Roth, supra)

[0133] 2′-5′ Oligoadenylates: The 2-5 A system is an interferon-mediated mechanism for RNA degradation found in higher vertebrates (Mitra et al., 1996, Proc Nat Acad Sci USA 93, 6780-6785). Two types of enzymes, 2-5A synthetase and RNase L, are required for RNA cleavage. The 2-5A synthetases require double stranded RNA to form 2′-5′ oligoadenylates (2-SA). 2-5A then acts as an allosteric effector for utilizing RNase L which has the ability to cleave single stranded RNA. The ability to form 2-5A structures with double stranded RNA makes this system particularly useful for inhibition of viral replication.

[0134] (2′-5′) oligoadenylate structures may be covalently linked to antisense molecules to form chimeric oligonucleotides capable of RNA cleavage (Torrence, supra). These molecules putatively bind and activate a 2-5A dependent RNase, the oligonucleotide/enzyme complex then binds to a target RNA molecule which can then be cleaved by the RNase enzyme. The covalent attachment of 2′-5′ oligoadenylate structures is not limited to antisense applications, and can be further elaborated to include attachment to nucleic acid molecules of the instant invention.

[0135] Enzymatic Nucleic Acid: Seven basic varieties of naturally-occurring enzymatic RNAs are presently known. In addition, several in vitro selection (evolution) strategies (Orgel, 1979, Proc. R. Soc. London, B 205, 435) have been used to evolve new nucleic acid catalysts capable of catalyzing cleavage and ligation of phosphodiester linkages (Joyce, 1989, Gene, 82, 83-87; Beaudry et al., 1992, Science 257, 635-641; Joyce, 1992, Scientific American 267, 90-97; Breaker et al., 1994, TIBTECH 12, 268; Bartel et al.,1993, Science 261:1411-1418; Szostak, 1993, TIBS 17, 89-93; Kumar et al., 1995, FASEB J., 9, 1183; Breaker, 1996, Curr. Op. Biotech., 7, 442; Santoro et al., 1997, Proc. Natl. Acad. Sci., 94, 4262; Tang et al., 1997, RNA 3, 914; Nakamaye & Eckstein, 1994, supra; Long & Uhlenbeck, 1994, supra; Ishizaka et al., 1995, supra; Vaish et al., 1997, Biochemistry 36, 6495; all of these are incorporated by reference herein). Each can catalyze a series of reactions including the hydrolysis of phosphodiester bonds in trans (and thus can cleave other RNA molecules) under physiological conditions.

[0136] Nucleic acid molecules of this invention will block to some extent HBV protein expression and can be used to treat disease or diagnose disease associated with the levels of HBV.

[0137] The enzymatic nature of an enzymatic nucleic acid has significant advantages, such as the concentration of enzymatic nucleic acid necessary to affect a therapeutic treatment is low. This advantage reflects the ability of the enzymatic nucleic acid to act enzymatically. Thus, a single enzymatic nucleic acid molecule is able to cleave many molecules of target RNA. In addition, the enzymatic nucleic acid is a highly specific inhibitor, with the specificity of inhibition depending not only on the base-pairing mechanism of binding to the target RNA, but also on the mechanism of target RNA cleavage. Single mismatches, or base-substitutions, near the site of cleavage can be chosen to completely eliminate catalytic activity of an enzymatic nucleic acid.

[0138] Nucleic acid molecules having an endonuclease enzymatic activity are able to repeatedly cleave other separate RNA molecules in a nucleotide base sequence-specific manner. Such enzymatic nucleic acid molecules can be targeted to virtually any RNA transcript, and achieve efficient cleavage in vitro (Zaug et al., 324, Nature, 429 1986 ; Uhlenbeck, 1987 Nature, 328, 596; Kim et al., 84 Proc. Natl. Acad. Sci. USA, 8788, 1987; Dreyfus, 1988, Einstein Quart. J. Bio. Med., 6, 92; Haseloff and Gerlach, 334 Nature, 585, 1988; Cech, 260 JAMA, 3030, 1988; Jefferies et al., 17 Nucleic Acids Research, 1371, 1989; and Santoro et al., 1997 supra).

[0139] Because of their sequence specificity, trans-cleaving enzymatic nucleic acids show promise as therapeutic agents for human disease (Usman & McSwiggen, 1995 Ann. Rep. Med. Chem. 30, 285-294; Christoffersen and Marr, 1995 J. Med. Chem. 38, 2023-2037). Enzymatic nucleic acids can be designed to cleave specific RNA targets within the background of cellular RNA. Such a cleavage event renders the RNA non-functional and abrogates protein expression from that RNA. In this manner, synthesis of a protein associated with a disease state can be selectively inhibited (Warashina et al., 1999, Chemistry and Biology, 6, 237-250.

[0140] The nucleic acid molecules of the instant invention are also referred to as GeneBloc™ reagents, which are essentially nucleic acid molecules (e.g.; enzymatic nucleic acids, antisense) capable of down-regulating gene expression.

[0141] Target Sites

[0142] Targets for useful enzymatic nucleic acids and antisense nucleic acids can be determined as disclosed in Draper et al., WO 93/23569; Sullivan et al., WO 93/23057; Thompson et al., WO 94/02595; Draper et al., WO 95/04818; McSwiggen et al., U.S. Pat. No. 5,525,468, and all hereby incorporated in their entirites by reference herein. Other examples include the following PCT applications, which concern inactivation of expression of disease-related genes: WO 95/23225, WO 95/13380, WO 94/02595, all incorporated by reference herein. Rather than repeat the guidance provided in those documents here, below are provided specific examples of such methods, not limiting to those in the art. Enzymatic nucleic acids and antisense to such targets are designed as described in those applications and synthesized to be tested in vitro and in vivo, as also described. The sequence of human HBV RNAs (for example, accession AF100308.1; HBV strain 2-18; additionally, other HBV strains can be screened by one skilled in the art, see Table III for other possible strains) were screened for optimal enzymatic nucleic acid and antisense target sites using a computer-folding algorithm. Antisense, hammerhead, DNAzyme, NCH (Inozyme), amberzyme, zinzyme or G-Cleaver enzymatic nucleic acid binding/cleavage sites were identified. These sites are shown in Tables V to XI (all sequences are 5′ to 3′ in the tables; X can be any base-paired sequence, the actual sequence is not relevant here). The nucleotide base position is noted in the Tables as that site to be cleaved by the designated type of enzymatic nucleic acid molecule. Table IV shows substrate positions selected from Renbo et al., 1987, Sci. Sin., 30, 507, used in Draper, U.S. Ser. No. (07/882,712), filed May 14, 1992, entitled “METHOD AND REAGENT FOR INHIBITING HEPATITIS B VIRUS REPLICATION” and Draper et al., International PCT publication No. WO 93/23569, filed Apr. 29, 1993, entitled “METHOD AND REAGENT FOR INHIBITING VIRAL REPLICATION”. While human sequences can be screened and enzymatic nucleic acid molecule and/or antisense thereafter designed, as discussed in Stinchcomb et al., WO 95/23225, mouse targeted enzymatic nucleic acids may be useful to test efficacy of action of the enzymatic nucleic acid molecule and/or antisense prior to testing in humans.

[0143] Antisense, hammerhead, DNAzyme, NCH (Inozyme), amberzyme, zinzyme or G-Cleaver enzymatic nucleic acid binding/cleavage sites were identified, as discussed above. The nucleic acid molecules were individually analyzed by computer folding (Jaeger et al., 1989 Proc. Natl. Acad. Sci. USA, 86, 7706) to assess whether the sequences fold into the appropriate secondary structure. Those nucleic acid molecules with unfavorable intramolecular interactions such as between the binding arms and the catalytic core were eliminated from consideration. Varying binding arm lengths can be chosen to optimize activity.

[0144] Antisense, hammerhead, DNAzyme, NCH, amberzyme, zinzyme or G-Cleaver enzymatic nucleic acid binding/cleavage sites were identified and were designed to anneal to various sites in the RNA target. The binding arms are complementary to the target site sequences described above. The nucleic acid molecules were chemically synthesized. The method of synthesis used follows the procedure for normal DNA/RNA synthesis as described below and in Usman et al., 1987 J. Am. Chem. Soc., 109, 7845; Scaringe et al., 1990 Nucleic Acids Res., 18, 5433; Wincott et al., 1995 Nucleic Acids Res. 23, 2677-2684; and Caruthers et al., 1992, Methods in Enzymology 211,3-19.

[0145] Synthesis of Nucleic Acid Molecules

[0146] Synthesis of nucleic acids greater than 100 nucleotides in length is difficult using automated methods, and the therapeutic cost of such molecules is prohibitive. In this invention, small nucleic acid motifs (“small” refers to nucleic acid motifs no more than 100 nucleotides in length, preferably no more than 80 nucleotides in length, and most preferably no more than 50 nucleotides in length; e.g., antisense oligonucleotides, hammerhead or the NCH enzymatic nucleic acids) are preferably used for exogenous delivery. The simple structure of these molecules increases the ability of the nucleic acid to invade targeted regions of RNA structure. Exemplary molecules of the instant invention are chemically synthesized, and others can similarly be synthesized.

[0147] Oligonucleotides (e.g.; antisense GeneBlocs) are synthesized using protocols known in the art as described in Caruthers et al., 1992, Methods in Enzymology 211, 3-19, Thompson et al., International PCT Publication No. WO 99/54459, Wincott et al., 1995, Nucleic Acids Res. 23, 2677-2684, Wincott et al., 1997, Methods Mol. Bio., 74, 59, Brennan et al., 1998, Biotechnol Bioeng., 61, 33-45, and Brennan, U.S. Pat. No. 6,001,311. All of these references are incorporated herein by reference. The synthesis of oligonucleotides makes use of common nucleic acid protecting and coupling groups, such as dimethoxytrityl at the 5′-end, and phosphoramidites at the 3′-end. In a non-limiting example, small scale syntheses are conducted on a 394 Applied Biosystems, Inc. synthesizer using a 0.2 μmol scale protocol with a 2.5 min coupling step for 2′-O-methylated nucleotides and a 45 sec coupling step for 2′-deoxy nucleotides. Table II outlines the amounts and the contact times of the reagents used in the synthesis cycle. Alternatively, syntheses at the 0.2 μmol scale can be performed on a 96-well plate synthesizer, such as the instrument produced by Protogene (Palo Alto, Calif.) with minimal modification to the cycle. A 33-fold excess (60 μL of 0.11 M=6.6 μmol) of 2′-O-methyl phosphoramidite and a 105-fold excess of S-ethyl tetrazole (60 μL of 0.25 M=15 μmol) can be used in each coupling cycle of 2′-O-methyl residues relative to polymer-bound 5′-hydroxyl. A 22-fold excess (40 μL of 0.11 M=4.4 μmol) of deoxy phosphoramidite and a 70-fold excess of S-ethyl tetrazole (40 μL of 0.25 M=10 μmol) can be used in each coupling cycle of deoxy residues relative to polymer-bound 5′-hydroxyl. Average coupling yields on the 394 Applied Biosystems, Inc. synthesizer, determined by colorimetric quantitation of the trityl fractions, are typically 97.5-99%. Other oligonucleotide synthesis reagents for the 394 Applied Biosystems, Inc. synthesizer include the following: detritylation solution is 3% TCA in methylene chloride (ABI); capping is performed with 16% N-methyl imidazole in THF (ABI) and 10% acetic anhydride/10% 2,6-lutidine in THF (ABI); and oxidation solution is 16.9 mM I₂, 49 mM pyridine, 9% water in THF (PERSEPTIVE™). Burdick & Jackson Synthesis Grade acetonitrile is used directly from the reagent bottle. S-Ethyltetrazole solution (0.25 M in acetonitrile) is made up from the solid obtained from American International Chemical, Inc. Alternately, for the introduction of phosphorothioate linkages, Beaucage reagent (3H-1,2-Benzodithiol-3-one 1,1-dioxide, 0.05 M in acetonitrile) is used.

[0148] Deprotection of the antisense oligonucleotides is performed as follows: the polymer-bound trityl-on oligoribonucleotide is transferred to a 4 mL glass screw top vial and suspended in a solution of 40% aq. methylamine (1 mL) at 65° C. for 10 min. After cooling to −20° C., the supernatant is removed from the polymer support. The support is washed three times with 1.0 mL of EtOH:MeCN:H2O/3:1:1, vortexed and the supernatant is then added to the first supernatant. The combined supernatants, containing the oligoribonucleotide, are dried to a white powder.

[0149] The method of synthesis used for normal RNA including certain enzymatic nucleic acid molecules follows the procedure as described in Usman et al., 1987, J. Am. Chem. Soc., 109, 7845; Scaringe et al., 1990, Nucleic Acids Res., 18, 5433; and Wincott et al., 1995, Nucleic Acids Res. 23, 2677-2684 Wincott et al., 1997, Methods Mol. Bio., 74, 59, and makes use of common nucleic acid protecting and coupling groups, such as dimethoxytrityl at the 5′-end, and phosphoramidites at the 3′-end. In a non-limiting example, small scale syntheses are conducted on a 394 Applied Biosystems, Inc. synthesizer using a 0.2 μmol scale protocol with a 7.5 min coupling step for alkylsilyl protected nucleotides and a 2.5 min coupling step for 2′-O-methylated nucleotides. Table II outlines the amounts and the contact times of the reagents used in the synthesis cycle. Alternatively, syntheses at the 0.2 μmol scale can be done on a 96-well plate synthesizer, such as the instrument produced by Protogene (Palo Alto, Calif.) with minimal modification to the cycle. A 33-fold excess (60 μL of 0.11 M=6.6 μmol) of 2′-O-methyl phosphoramidite and a 75-fold excess of S-ethyl tetrazole (60 μL of 0.25 M=15 μmol) can be used in each coupling cycle of 2′-O-methyl residues relative to polymer-bound 5′-hydroxyl. A 66-fold excess (120 μL of 0.11 M=13.2 μmol) of alkylsilyl (ribo) protected phosphoramidite and a 150-fold excess of S-ethyl tetrazole (120 μL of 0.25 M=30 μmol) can be used in each coupling cycle of ribo residues relative to polymer-bound 5′-hydroxyl. Average coupling yields on the 394 Applied Biosystems, Inc. synthesizer, determined by colorimetric quantitation of the trityl fractions, are typically 97.5-99%. Other oligonucleotide synthesis reagents for the 394 Applied Biosystems, Inc. synthesizer include the following: detritylation solution is 3% TCA in methylene chloride (ABI); capping is performed with 16% N-methyl imidazole in THF (ABI) and 10% acetic anhydride/10% 2,6-lutidine in THF (ABI); oxidation solution is 16.9 mM I₂, 49 mM pyridine, 9% water in THF (PERSEPTIVE™). Burdick & Jackson Synthesis Grade acetonitrile is used directly from the reagent bottle. S-Ethyltetrazole solution (0.25 M in acetonitrile) is made up from the solid obtained from American International Chemical, Inc. Alternately, for the introduction of phosphorothioate linkages, Beaucage reagent (3H-1,2-Benzodithiol-3-one 1,1-dioxide0.05 M in acetonitrile) is used.

[0150] Deprotection of the RNA is performed using either a two-pot or one-pot protocol. For the two-pot protocol, the polymer-bound trityl-on oligoribonucleotide is transferred to a 4 mL glass screw top vial and suspended in a solution of 40% aq. methylamine (1 mL) at 65° C. for 10 min. After cooling to −20° C., the supernatant is removed from the polymer support. The support is washed three times with 1.0 mL of EtOH:MeCN:H2O/3:1:1, vortexed and the supernatant is then added to the first supernatant. The combined supernatants, containing the oligoribonucleotide, are dried to a white powder. The base deprotected oligoribonucleotide is resuspended in anhydrous TEA/HF/NMP solution (300 μL of a solution of 1.5 mL N-methylpyrrolidinone, 750 μL TEA and 1 mL TEA·3HF to provide a 1.4 M HF concentration) and heated to 65° C. After 1.5 h, the oligomer is quenched with 1.5 M NH₄HCO₃.

[0151] Alternatively, for the one-pot protocol, the polymer-bound trityl-on oligoribonucleotide is transferred to a 4 mL glass screw top vial and suspended in a solution of 33% ethanolic methylamine/DMSO: 1/1 (0.8 mL) at 65° C. for 15 min. The vial is brought to r.t. TEA·3HF (0.1 mL) is added and the vial is heated at 65° C. for 15 min. The sample is cooled at −20° C. and then quenched with 1.5 M NH₄HCO₃.

[0152] For purification of the trityl-on oligomers, the quenched NH₄HCO₃ solution is loaded onto a C-18 containing cartridge that had been prewashed with acetonitrile followed by 50 mM TEAA. After washing the loaded cartridge with water, the RNA is detritylated with 0.5% TFA for 13 min. The cartridge is then washed again with water, salt exchanged with 1 M NaCl and washed with water again. The oligonucleotide is then eluted with 30% acetonitrile.

[0153] Inactive hammerhead enzymatic nucleic acids or binding attenuated control (BAC) oligonucleotides) are synthesized by substituting a U for G₅ and a U for A₁₄ (numbering from Hertel, K. J., et al., 1992, Nucleic Acids Res., 20, 3252). Similarly, one or more nucleotide substitutions can be introduced in other enzymatic nucleic acid molecules to inactivate the molecule and such molecules can serve as a negative control.

[0154] The average stepwise coupling yields are typically >98% (Wincott et al., 1995 Nucleic Acids Res. 23, 2677-2684). Those of ordinary skill in the art will recognize that the scale of synthesis can be adapted to be larger or smaller than the example described above including but not limited to 96-well format, all that is important is the ratio of chemicals used in the reaction.

[0155] Alternatively, the nucleic acid molecules of the present invention can be synthesized separately and joined together post-synthetically, for example, by ligation (Moore et al., 1992, Science 256, 9923; Draper et al., International PCT publication No. WO 93/23569; Shabarova et al., 1991, Nucleic Acids Research 19, 4247; Bellon et al., 1997, Nucleosides & Nucleotides, 16, 951; Bellon et al., 1997, Bioconjugate Chem. 8, 204).

[0156] The nucleic acid molecules of the present invention are modified extensively to enhance stability by modification with nuclease resistant groups, for example, 2′-amino, 2′-C-allyl, 2′-flouro, 2′-O-methyl, 2′-H (for a review see Usman and Cedergren, 1992, TIBS 17, 34; Usman et al., 1994, Nucleic Acids Symp. Ser. 31, 163). Enzymatic nucleic acids are purified by gel electrophoresis using general methods or are purified by high pressure liquid chromatography (HPLC; see Wincott et al., supra, the totality of which is hereby incorporated herein by reference) and are re-suspended in water.

[0157] The sequences of the enzymatic nucleic acids and antisense constructs that are chemically synthesized, useful in this study, are shown in Tables IV to IX. Those in the art will recognize that these sequences are representative only of many more such sequences where the enzymatic portion of the enzymatic nucleic acid (all but the binding arms) is altered to affect activity. The enzymatic nucleic acid and antisense construct sequences listed in Tables IV to IX may be formed of ribonucleotides or other nucleotides or non-nucleotides. Such enzymatic nucleic acids with enzymatic activity are equivalent to the enzymatic nucleic acids described specifically in the Tables.

[0158] Optimizing Activity of the Nucleic Acid Molecule of the Invention

[0159] Chemically synthesizing nucleic acid molecules with modifications (base, sugar and/or phosphate) that prevent their degradation by serum ribonucleases may increase their potency (see e.g., Eckstein et al., International Publication No. WO 92/07065; Perrault et al., 1990 Nature 344, 565; Pieken et al., 1991, Science 253, 314; Usman and Cedergren, 1992, Trends in Biochem. Sci. 17, 334; Usman et al., International Publication No. WO 93/15187; Rossi et al., International Publication No. WO 91/03162; Sproat, U.S. Pat. No. 5,334,711; and Burgin et al., supra; all of these describe various chemical modifications that can be made to the base, phosphate and/or sugar moieties of the nucleic acid molecules herein and are all hereby incorporated by reference herein). Modifications which enhance their efficacy in cells, and removal of bases from nucleic acid molecules to shorten oligonucleotide synthesis times and reduce chemical requirements are desired.

[0160] There are several examples in the art describing sugar, base and phosphate modifications that can be introduced into nucleic acid molecules with significant enhancement in their nuclease stability and efficacy. For example, oligonucleotides are modified to enhance stability and/or enhance biological activity by modification with nuclease resistant groups, for example, 2′-amino, 2′-C-allyl, 2′-flouro, 2′-O-methyl, 2′-H, nucleotide base modifications (for a review see Usman and Cedergren, 1992, TIBS. 17, 34; Usman et al., 1994, Nucleic Acids Symp. Ser. 31, 163; Burgin et al., 1996, Biochemistry, 35, 14090). Sugar modification of nucleic acid molecules have been extensively described in the art (see Eckstein et al., International Publication PCT No. WO 92/07065; Perrault et al. Nature, 1990, 344, 565-568; Pieken et al. Science, 1991, 253, 314-317; Usman and Cedergren, Trends in Biochem. Sci., 1992, 17, 334-339; Usman et al. International Publication PCT No. WO 93/15187; Sproat, U.S. Pat. No. 5,334,711 and Beigelman et al., 1995, J. Biol. Chem., 270, 25702; Beigelman et al., International PCT publication No. WO 97/26270; Beigelman et al., U.S. Pat. No. 5,716,824; Usman et al., U.S. Pat. No. 5,627,053; Woolf et al., International PCT Publication No. WO 98/13526; Thompson et al., U.S. Ser. No. 60/082,404 which was filed on Apr. 20, 1998; Karpeisky et al., 1998, Tetrahedron Lett., 39, 1131; Earnshaw and Gait, 1998, Biopolymers (Nucleic Acid Sciences), 48, 39-55; Verma and Eckstein, 1998, Annu. Rev. Biochem., 67, 99-134; and Burlina et al., 1997, Bioorg. Med. Chem., 5, 1999-2010; all of the references are hereby incorporated in their totality by reference herein). Such publications describe general methods and strategies to determine the location of incorporation of sugar, base and/or phosphate modifications and the like into enzymatic nucleic acids without inhibiting catalysis, and are incorporated by reference herein. In view of such teachings, similar modifications can be used as described herein to modify the nucleic acid molecules of the instant invention.

[0161] While chemical modification of oligonucleotide internucleotide linkages with phosphorothioate, phosphorothioate, and/or 5′-methylphosphonate linkages improves stability, too many of these modifications may cause some toxicity. Therefore, when designing nucleic acid molecules, the amount of these internucleotide linkages should be minimized. The reduction in the concentration of these linkages should lower toxicity resulting in increased efficacy and higher specificity of these molecules.

[0162] Nucleic acid molecules having chemical modifications which maintain or enhance activity are provided. Such nucleic acid molecules are also generally more resistant to nucleases than unmodified nucleic acid. Thus, in a cell and/or in vivo the activity may not be significantly lowered. Therapeutic nucleic acid molecules delivered exogenously must optimally be stable within cells until translation of the target RNA has been inhibited long enough to reduce the levels of the undesirable protein. This period of time varies between hours to days depending upon the disease state. Clearly, nucleic acid molecules must be resistant to nucleases in order to function as effective intracellular therapeutic agents. Improvements in the chemical synthesis of RNA and DNA (Wincott et al., 1995 Nucleic Acids Res. 23, 2677; Caruthers et al., 1992, Methods in Enzymology 211,3-19 (are incorporated by reference herein) have expanded the ability to modify nucleic acid molecules by introducing nucleotide modifications to enhance their nuclease stability as described above.

[0163] Use of these the nucleic acid-based molecules of the invention will lead to better treatment of the disease progression by affording the possibility of combination therapies (e.g., multiple antisense or enzymatic nucleic acid molecules targeted to different genes, nucleic acid molecules coupled with known small molecule inhibitors, or intermittent treatment with combinations of molecules (including different motifs) and/or other chemical or biological molecules). The treatment of patients with nucleic acid molecules may also include combinations of different types of nucleic acid molecules.

[0164] Therapeutic nucleic acid molecules (e.g., enzymatic nucleic acid molecules and antisense nucleic acid molecules) delivered exogenously must optimally be stable within cells until translation of the target RNA has been inhibited long enough to reduce the levels of the undesirable protein. This period of time varies between hours to days depending upon the disease state. Clearly, these nucleic acid molecules must be resistant to nucleases in order to function as effective intracellular therapeutic agents. Improvements in the chemical synthesis of nucleic acid molecules described in the instant invention and in the art have expanded the ability to modify nucleic acid molecules by introducing nucleotide modifications to enhance their nuclease stability as described above.

[0165] By “enhanced enzymatic activity” is meant to include activity measured in cells and/or in vivo where the activity is a reflection of both catalytic activity and enzymatic nucleic acid stability. In this invention, the product of these properties is increased or not significantly (less than 10-fold) decreased in vivo compared to an all RNA enzymatic nucleic acid or all DNA enzyme.

[0166] In yet another preferred embodiment, nucleic acid catalysts having chemical modifications which maintain or enhance enzymatic activity is provided. Such nucleic acid catalysts are also generally more resistant to nucleases than unmodified nucleic acid. Thus, in a cell and/or in vivo the activity may not be significantly lowered. As exemplified herein such enzymatic nucleic acids are useful in a cell and/or in vivo even if activity over all is reduced 10 fold (Burgin et al., 1996, Biochemistry, 35, 14090). Such enzymatic nucleic acids herein are said to “maintain” the enzymatic activity of an all RNA enzymatic nucleic acid.

[0167] In another aspect the nucleic acid molecules comprise a 5′ and/or a 3′-cap structure.

[0168] By “cap structure” is meant chemical modifications, which have been incorporated at either terminus of the oligonucleotide (see, for example, Wincott et al., WO 97/26270, incorporated by reference herein). These terminal modifications protect the nucleic acid molecule from exonuclease degradation, and may help in delivery and/or localization within a cell. The cap may be present at the 5′-terminus (5′-cap) or at the 3′-terminal (3′-cap) or may be present on both termini. In non-limiting examples: the 5′-cap is selected from the group comprising inverted abasic residue (moiety); 4′,5′-methylene nucleotide; 1-(beta-D-erythrofuranosyl) nucleotide, 4′-thio nucleotide; carbocyclic nucleotide; 1,5-anhydrohexitol nucleotide; L-nucleotides; alpha-nucleotides; modified base nucleotide; phosphorodithioate linkage; threo-pentofuranosyl nucleotide; acyclic 3′,4′-seco nucleotide; acyclic 3,4-dihydroxybutyl nucleotide; acyclic 3,5-dihydroxypentyl nucleotide, 3′-3′-inverted nucleotide moiety; 3′-3′-inverted abasic moiety; 3′-2′-inverted nucleotide moiety; 3′-2′-inverted abasic moiety; 1,4-butanediol phosphate; 3′-phosphoramidate; hexylphosphate; aminohexyl phosphate; 3′-phosphate; 3′-phosphorothioate; phosphorodithioate; or bridging or non-bridging methylphosphonate moiety (for more details, see Wincott et al., International PCT publication No. WO 97/26270, incorporated by reference herein).

[0169] In yet another preferred embodiment, the 3′-cap is selected from a group comprising, 4′,5′-methylene nucleotide; 1-(beta-D-erythrofuranosyl) nucleotide; 4′-thio nucleotide, carbocyclic nucleotide; 5′-amino-alkyl phosphate; 1,3-diamino-2-propyl phosphate; 3-aminopropyl phosphate; 6-aminohexyl phosphate; 1,2-aminododecyl phosphate; hydroxypropyl phosphate; 1,5-anhydrohexitol nucleotide; L-nucleotide; alpha-nucleotide; modified base nucleotide; phosphorodithioate; threo-pentofuranosyl nucleotide; acyclic 3′,4′-seco nucleotide; 3,4-dihydroxybutyl nucleotide; 3,5-dihydroxypentyl nucleotide, 5′-5′-inverted nucleotide moiety; 5′-5′-inverted abasic moiety; 5′-phosphoramidate; 5′-phosphorothioate; 1,4-butanediol phosphate; 5′-amino; bridging and/or non-bridging 5′-phosphoramidate, phosphorothioate and/or phosphorodithioate, bridging or non bridging methylphosphonate and 5′-mercapto moieties (for more details see Beaucage and Tyer, 1993, Tetrahedron 49, 1925; incorporated by reference herein).

[0170] By the term “non-nucleotide” is meant any group or compound which can be incorporated into a nucleic acid chain in the place of one or more nucleotide units, including either sugar and/or phosphate substitutions, and allows the remaining bases to exhibit their enzymatic activity. The group or compound is abasic in that it does not contain a commonly recognized nucleotide base, such as adenosine, guanine, cytosine, uracil or thymine.

[0171] An “alkyl” group refers to a saturated aliphatic hydrocarbon, including straight-chain, branched-chain, and cyclic alkyl groups. Preferably, the alkyl group has 1 to 12 carbons. More preferably it is a lower alkyl of from 1 to 7 carbons, more preferably 1 to 4 carbons. The alkyl group may be substituted or unsubstituted. When substituted the substituted group(s) is preferably, hydroxyl, cyano, alkoxy, ═O, ═S, NO₂ or N(CH₃)₂, amino, or SH. The term also includes alkenyl groups which are unsaturated hydrocarbon groups containing at least one carbon-carbon double bond, including straight-chain, branched-chain, and cyclic groups. Preferably, the alkenyl group has 1 to 12 carbons. More preferably it is a lower alkenyl of from 1 to 7 carbons, more preferably 1 to 4 carbons. The alkenyl group may be substituted or unsubstituted. When substituted the substituted group(s) is preferably, hydroxyl, cyano, alkoxy, ═O, ═S, NO₂, halogen, N(CH₃)₂, amino, or SH. The term “alkyl” also includes alkynyl groups which have an unsaturated hydrocarbon group containing at least one carbon-carbon triple bond, including straight-chain, branched-chain, and cyclic groups. Preferably, the alkynyl group has 1 to 12 carbons. More preferably it is a lower alkynyl of from 1 to 7 carbons, more preferably 1 to 4 carbons. The alkynyl group may be substituted or unsubstituted. When substituted the substituted group(s) is preferably, hydroxyl, cyano, alkoxy, ═O, ═S, NO₂ or N(CH₃)₂, amino or SH.

[0172] Such alkyl groups may also include aryl, alkylaryl, carbocyclic aryl, heterocyclic aryl, amide and ester groups. An “aryl” group refers to an aromatic group which has at least one ring having a conjugated pi electron system and includes carbocyclic aryl, heterocyclic aryl and biaryl groups, all of which may be optionally substituted. The preferred substituent(s) of aryl groups are halogen, trihalomethyl, hydroxyl, SH, OH, cyano, alkoxy, alkyl, alkenyl, alkynyl, and amino groups. An “alkylaryl” group refers to an alkyl group (as described above) covalently joined to an aryl group (as described above). Carbocyclic aryl groups are groups wherein the ring atoms on the aromatic ring are all carbon atoms. The carbon atoms are optionally substituted. Heterocyclic aryl groups are groups having from 1 to 3 heteroatoms as ring atoms in the aromatic ring and the remainder of the ring atoms are carbon atoms. Suitable heteroatoms include oxygen, sulfur, and nitrogen, and include furanyl, thienyl, pyridyl, pyrrolyl, N-lower alkyl pyrrolo, pyrimidyl, pyrazinyl, imidazolyl and the like, all optionally substituted. An “amide” refers to an —C(O)—NH—R, where R is either alkyl, aryl, alkylaryl or hydrogen. An “ester” refers to an —C(O)—OR′, where R is either alkyl, aryl, alkylaryl or hydrogen.

[0173] By “nucleotide” as used herein is as recognized in the art to include natural bases (standard), and modified bases well known in the art. Such bases are generally located at the 1′ position of a nucleotide sugar moiety. Nucleotides generally comprise a base, sugar and a phosphate group. The nucleotides can be unmodified or modified at the sugar, phosphate and/or base moiety, (also referred to interchangeably as nucleotide analogs, modified nucleotides, nonnatural nucleotides, non-standard nucleotides and other; see, for example, Usman and McSwiggen, supra; Eckstein et al., International PCT Publication No. WO 92/07065; Usman et al., International PCT Publication No. WO 93/15187; Uhlman & Peyman, supra, all are hereby incorporated by reference herein). There are several examples of modified nucleic acid bases known in the art as summarized by Limbach et al., 1994, Nucleic Acids Res. 22, 2183. Some of the non-limiting examples of base modifications that can be introduced into nucleic acid molecules include, inosine, purine, pyridin-4-one, pyridin-2-one, phenyl, pseudouracil, 2, 4, 6-trimethoxy benzene, 3-methyl uracil, dihydrouridine, naphthyl, aminophenyl, 5-alkylcytidines (e.g., 5-methylcytidine), 5-alkyluridines (e.g., ribothymidine), 5-halouridine (e.g., 5-bromouridine) or 6-azapyrimidines or 6-alkylpyrimidines (e.g. 6-methyluridine), propyne, and others (Burgin et al., 1996, Biochemistry, 35, 14090; Uhlman & Peyman, supra). By “modified bases” in this aspect is meant nucleotide bases other than adenine, guanine, cytosine and uracil at 1′ position or their equivalents; such bases may be used at any position, for example, within the catalytic core of an enzymatic nucleic acid molecule and/or in the substrate-binding regions of the nucleic acid molecule.

[0174] In a preferred embodiment, the invention features modified enzymatic nucleic acids with phosphate backbone modifications comprising one or more phosphorothioate, phosphorodithioate, methylphosphonate, morpholino, amidate carbamate, carboxymethyl, acetamidate, polyamide, sulfonate, sulfonamide, sulfamate, formacetal, thioforrnacetal, and/or alkylsilyl, substitutions. For a review of oligonucleotide backbone modifications, see Hunziker and Leumann, 1995, Nucleic Acid Analogues: Synthesis and Properties, in Modern Synthetic Methods, VCH, 331-417, and Mesmaeker et al., 1994, Novel Backbone Replacements for Oligonucleotides, in Carbohydrate Modifications in Antisense Research, ACS, 24-39. These references are hereby incorporated by reference herein.

[0175] By “abasic” is meant sugar moieties lacking a base or having other chemical groups in place of a base at the 1′ position, (for more details, see Wincott et al., International PCT publication No. WO 97/26270).

[0176] By “unmodified nucleoside” is meant one of the bases adenine, cytosine, guanine, thymine, uracil joined to the 1′ carbon of β-D-ribo-furanose.

[0177] By “modified nucleoside” is meant any nucleotide base which contains a modification in the chemical structure of an unmodified nucleotide base, sugar and/or phosphate.

[0178] In connection with 2′-modified nucleotides as described for the present invention, by “amino” is meant 2′-NH₂ or 2′-O-NH₂, which may be modified or unmodified. Such modified groups are described, for example, in Eckstein et al., U.S. Pat. No. 5,672,695 and Matulic-Adamic et al., WO 98/28317, which are both incorporated by reference in their entireties.

[0179] Various modifications to nucleic acid (e.g., antisense and enzymatic nucleic acid) structure can be made to enhance the utility of these molecules. Such modifications will enhance shelf-life, half-life in vitro, stability, and ease of introduction of such oligonucleotides to the target site, e.g., to enhance penetration of cellular membranes, and confer the ability to recognize and bind to targeted cells.

[0180] Use of these molecules will lead to better treatment of the disease progression by affording the possibility of combination therapies (e.g., multiple enzymatic nucleic acids targeted to different genes, enzymatic nucleic acids coupled with known small molecule inhibitors, or intermittent treatment with combinations of enzymatic nucleic acids (including different enzymatic nucleic acid motifs) and/or other chemical or biological molecules). The treatment of patients with nucleic acid molecules may also include combinations of different types of nucleic acid molecules. Therapies may be devised which include a mixture of enzymatic nucleic acids (including different enzymatic nucleic acid motifs), antisense and/or 2-5A chimera molecules to one or more targets to alleviate symptoms of a disease.

[0181] Administration of Nucleic Acid Molecules

[0182] Methods for the delivery of nucleic acid molecules are described in Akhtar et al., 1992, Trends Cell Bio., 2, 139; and Delivery Strategies for Antisense Oligonucleotide Therapeutics, ed. Akhtar, 1995 which are both incorporated herein by reference. Sullivan et al., PCT WO 94/02595, further describes the general methods for delivery of enzymatic RNA molecules. These protocols may be utilized for the delivery of virtually any nucleic acid molecule. Nucleic acid molecules may be administered to cells by a variety of methods known to those familiar to the art, including, but not restricted to, encapsulation in liposomes, by iontophoresis, or by incorporation into other vehicles, such as hydrogels, cyclodextrins, biodegradable nanocapsules, and bioadhesive microspheres. For some indications, nucleic acid molecules may be directly delivered ex vivo to cells or tissues with or without the aforementioned vehicles. Alternatively, the nucleic acid/vehicle combination is locally delivered by direct injection or by use of a catheter, infusion pump or stent. Other routes of delivery include, but are not limited to, intravascular, intramuscular, subcutaneous or joint injection, aerosol inhalation, oral (tablet or pill form), topical, systemic, ocular, intraperitoneal and/or intrathecal delivery. More detailed descriptions of nucleic acid delivery and administration are provided in Sullivan et al., supra, Draper et al., PCT WO93/23569; Beigelman et al., PCT WO99/05094, and Klimuk et al., PCT WO99/04819 all of which are incorporated by reference herein.

[0183] The molecules of the instant invention can be used as pharmaceutical agents. Pharmaceutical agents prevent, inhibit the occurrence, or treat (alleviate a symptom to some extent, preferably all of the symptoms) of a disease state in a patient.

[0184] The negatively charged polynucleotides of the invention can be administered (e.g., RNA, DNA or protein) and introduced into a patient by any standard means, with or without stabilizers, buffers, and the like, to form a pharmaceutical composition. When it is desired to use a liposome delivery mechanism, standard protocols for formation of liposomes can be followed. The compositions of the present invention may also be formulated and used as tablets, capsules or elixirs for oral administration; suppositories for rectal administration; sterile solutions; suspensions for injectable administration; and the other compositions known in the art.

[0185] The present invention also includes pharmaceutically acceptable formulations of the compounds described. These formulations include salts of the above compounds, e.g., acid addition salts, for example, salts of hydrochloric, hydrobromic, acetic acid, and benzene sulfonic acid.

[0186] A pharmacological composition or formulation refers to a composition or formulation in a form suitable for administration, e.g., systemic administration, into a cell or patient, preferably a human. Suitable forms, in part, depend upon the use or the route of entry, for example, oral, transdermal, or by injection. Such forms should not prevent the composition or formulation from reaching a target cell (i.e., a cell to which the negatively charged polymer is desired to be delivered to). For example, pharmacological compositions injected into the blood stream should be soluble. Other factors are known in the art, and include considerations such as toxicity and forms which prevent the composition or formulation from exerting its effect.

[0187] By “systemic administration” is meant in vivo systemic absorption or accumulation of drugs in the blood stream followed by distribution throughout the entire body. Administration routes which lead to systemic absorption include, without limitations: intravenous, subcutaneous, intraperitoneal, inhalation, oral, intrapulmonary and intramuscular. Each of these administration routes expose the desired negatively charged polymers, e.g., nucleic acids, to an accessible diseased tissue. The rate of entry of a drug into the circulation has been shown to be a function of molecular weight or size. The use of a liposome or other drug carrier comprising the compounds of the instant invention can potentially localize the drug, for example, in certain tissue types, such as the tissues of the reticular endothelial system (RES). A liposome formulation which can facilitate the association of drug with the surface of cells, such as, lymphocytes and macrophages is also useful. This approach may provide enhanced delivery of the drug to target cells by taking advantage of the specificity of macrophage and lymphocyte immune recognition of abnormal cells, such as cancer cells.

[0188] By pharmaceutically acceptable formulation is meant, a composition or formulation that allows for the effective distribution of the nucleic acid molecules of the instant invention in the physical location most suitable for their desired activity. Nonlimiting examples of agents suitable for formulation with the nucleic acid molecules of the instant invention include: P-glycoprotein inhibitors (such as Pluronic P85) which can enhance entry of drugs into the CNS (Jolliet-Riant and Tillement, 1999, Fundam. Clin. Pharmacol., 13, 16-26); biodegradable polymers, such as poly (DL-lactide-coglycolide) microspheres for sustained release delivery after intracerebral implantation (Emerich, DF et al, 1999, Cell Transplant, 8, 47-58) Alkermes, Inc. Cambridge, Mass.; and loaded nanoparticles, such as those made of polybutylcyanoacrylate, which can deliver drugs across the blood brain barrier and can alter neuronal uptake mechanisms (Prog Neuropsychopharmacol Biol Psychiatry, 23, 941-949, 1999). Other non-limiting examples of delivery strategies for the nucleic acid molecules of the instant invention include material described in Boado et al., 1998, J. Pharm. Sci., 87, 1308-1315; Tyler et al., 1999, FEBS Lett., 421, 280-284; Pardridge et al., 1995, PNAS USA., 92, 5592-5596; Boado, 1995, Adv. Drug Delivery Rev., 15, 73-107; Aldrian-Herrada et al., 1998, Nucleic Acids Res., 26, 4910-4916; and Tyler et al., 1999, PNAS USA., 96, 7053-7058.

[0189] The invention also features the use of the composition comprising surface-modified liposomes containing poly (ethylene glycol) lipids (PEG-modified, or long-circulating liposomes or stealth liposomes). These formulations offer a method for increasing the accumulation of drugs in target tissues. This class of drug carriers resists opsonization and elimination by the mononuclear phagocytic system (MPS or RES), thereby enabling longer blood circulation times and enhanced tissue exposure for the encapsulated drug (Lasic et al. Chem. Rev. 1995, 95, 2601-2627; Ishiwata et al., Chem. Pharm. Bull. 1995, 43, 1005-1011). Such liposomes have been shown to accumulate selectively in tumors, presumably by extravasation and capture in the neovascularized target tissues (Lasic et al., Science 1995, 267, 1275-1276; Oku et al., 1995, Biochim. Biophys. Acta, 1238, 86-90). The long-circulating liposomes enhance the pharmacokinetics and pharmacodynamics of DNA and RNA, particularly compared to conventional cationic liposomes which are known to accumulate in tissues of the MPS (Liu et al., J. Biol. Chem. 1995, 42, 24864-24870; Choi et al., International PCT Publication No. WO 96/10391; Ansell et al., International PCT Publication No. WO 96/10390; Holland et al., International PCT Publication No. WO 96/10392; all of which are incorporated by reference herein). Long-circulating liposomes are also likely to protect drugs from nuclease degradation to a greater extent compared to cationic liposomes, based on their ability to avoid accumulation in metabolically aggressive MPS tissues such as the liver and spleen.

[0190] The present invention also includes compositions prepared for storage or administration which include a pharmaceutically effective amount of the desired compounds in a pharmaceutically acceptable carrier or diluent. Acceptable carriers or diluents for therapeutic use are well known in the pharmaceutical art, and are described, for example, in Remington's Pharmaceutical Sciences, Mack Publishing Co. (A. R. Gennaro edit. 1985) hereby incorporated by reference herein. For example, preservatives, stabilizers, dyes and flavoring agents may be provided. These include sodium benzoate, sorbic acid and esters of p-hydroxybenzoic acid. In addition, antioxidants and suspending agents may be used.

[0191] A pharmaceutically effective dose is that dose required to prevent, inhibit the occurrence, or treat (alleviate a symptom to some extent, preferably all of the symptoms) of a disease state. The pharmaceutically effective dose depends on the type of disease, the composition used, the route of administration, the type of mammal being treated, the physical characteristics of the specific mammal under consideration, concurrent medication, and other factors which those skilled in the medical arts will recognize. Generally, an amount between 0.1 mg/kg and 100 mg/kg body weight/day of active ingredients is administered dependent upon potency of the negatively charged polymer.

[0192] The nucleic acid molecules of the present invention may also be administered to a patient in combination with other therapeutic compounds to increase the overall therapeutic effect. The use of multiple compounds to treat an indication may increase the beneficial effects while reducing the presence of side effects.

[0193] Alternatively, certain of the nucleic acid molecules of the instant invention can be expressed within cells from eukaryotic promoters (e.g., Izant and Weintraub, 1985, Science, 229, 345; McGarry and Lindquist, 1986, Proc. Natl. Acad. Sci., USA 83, 399; Scanlon et al., 1991, Proc. Natl. Acad. Sci. USA, 88, 10591-5; Kashani-Sabet et al., 1992, Antisense Res. Dev., 2, 3-15; Dropulic et al., 1992, J. Virol., 66, 1432-41; Weerasinghe et al., 1991, J. Virol., 65, 5531-4; Ojwang et al., 1992, Proc. Natl. Acad. Sci. USA, 89, 10802-6; Chen et al., 1992, Nucleic Acids Res., 20, 4581-9; Sarver et al., 1990 Science, 247, 1222-1225; Thompson et al., 1995, Nucleic Acids Res., 23, 2259; Good et al., 1997, Gene Therapy, 4, 45; all of these references are hereby incorporated in their totalites by reference herein). Those skilled in the art realize that any nucleic acid can be expressed in eukaryotic cells from the appropriate DNA/RNA vector. The activity of such nucleic acids can be augmented by their release from the primary transcript by a ribozyme (Draper et al., PCT WO 93/23569, and Sullivan et al., PCT WO 94/02595; Ohkawa et al., 1992, Nucleic Acids Symp. Ser., 27, 15-6; Taira et al., 1991, Nucleic Acids Res., 19, 5125-30; Ventura et al., 1993, Nucleic Acids Res., 21, 3249-55; Chowrira et al., 1994, J. Biol. Chem., 269, 25856; all of these references are hereby incorporated in their totality by reference herein).

[0194] In another aspect of the invention, RNA molecules of the present invention are preferably expressed from transcription units (see, for example, Couture et al., 1996, TIG., 12, 510) inserted into DNA or RNA vectors. The recombinant vectors are preferably DNA plasmids or viral vectors. Enzymatic nucleic acid expressing viral vectors could be constructed based on, but not limited to, adeno-associated virus, retrovirus, adenovirus, or alphavirus. Preferably, the recombinant vectors capable of expressing the nucleic acid molecules are delivered as described above, and persist in target cells. Alternatively, viral vectors may be used that provide for transient expression of nucleic acid molecules. Such vectors might be repeatedly administered as necessary. Once expressed, the nucleic acid molecule binds to the target mRNA. Delivery of nucleic acid molecule expressing vectors could be systemic, such as by intravenous or intramuscular administration, by administration to target cells ex-planted from the patient followed by reintroduction into the patient, or by any other means that would allow for introduction into the desired target cell (for a review see Couture et al., 1996, TIG., 12, 510).

[0195] In one aspect, the invention features an expression vector comprising a nucleic acid sequence encoding at least one of the nucleic acid molecules of the instant invention is disclosed. The nucleic acid sequence encoding the nucleic acid molecule of the instant invention is operable linked in a manner which allows expression of that nucleic acid molecule.

[0196] In another aspect the invention features an expression vector comprising: a) a transcription initiation region (e.g., eukaryotic pol I, II or III initiation region); b) a transcription termination region (e.g., eukaryotic pol I, II or III termination region); c) a nucleic acid sequence encoding at least one of the nucleic acid catalyst of the instant invention; and wherein said sequence is operably linked to said initiation region and said termination region, in a manner which allows expression and/or delivery of said nucleic acid molecule. The vector may optionally include an open reading frame (ORF) for a protein operably linked on the 5′ side or the 3′-side of the sequence encoding the nucleic acid catalyst of the invention; and/or an intron (intervening sequences).

[0197] Transcription of the nucleic acid molecule sequences are driven from a promoter for eukaryotic RNA polymerase I (pol I), RNA polymerase II (pol II), or RNA polymerase III (pol III). Transcripts from pol II or pol III promoters will be expressed at high levels in all cells; the levels of a given pol II promoter in a given cell type will depend on the nature of the gene regulatory sequences (enhancers, silencers, etc.) present nearby. Prokaryotic RNA polymerase promoters are also used, providing that the prokaryotic RNA polymerase enzyme is expressed in the appropriate cells (Elroy-Stein and Moss, 1990, Proc. Natl. Acad. Sci. USA, 87, 6743-7; Gao and Huang 1993, Nucleic Acids Res., 21, 2867-72; Lieber et al., 1993, Methods Enzymol., 217, 47-66; Zhou et al., 1990, Mol. Cell. Biol., 10, 4529-37). All of these references are incorporated by reference herein. Several investigators have demonstrated that nucleic acid molecules, such as enzymatic nucleic acids expressed from such promoters can function in mammalian cells (e.g. Kashani-Sabet et al., 1992, Antisense Res. Dev., 2, 3-15; Ojwang et al., 1992, Proc. Natl. Acad. Sci. USA, 89, 10802-6; Chen et al., 1992, Nucleic Acids Res., 20, 4581-9; Yu et al., 1993, Proc. Natl. Acad. Sci. USA, 90, 6340-4; L'Huillier et al., 1992, EMBO J., 11, 4411-8; Lisziewicz et al., 1993, Proc. Natl. Acad. Sci. U.S.A., 90, 8000-4; Thompson et al., 1995, Nucleic Acids Res., 23, 2259; Sullenger & Cech, 1993, Science, 262, 1566). More specifically, transcription units such as the ones derived from genes encoding U6 small nuclear (snRNA), transfer RNA (tRNA) and adenovirus VA RNA are useful in generating high concentrations of desired RNA molecules such as enzymatic nucleic acids in cells (Thompson et al., supra; Couture and Stinchcomb, 1996, supra; Noonberg et al., 1994, Nucleic Acid Res., 22, 2830; Noonberg et al., U.S. Pat. No. 5,624,803; Good et al., 1997, Gene Ther., 4, 45; Beigelman et al., International PCT Publication No. WO 96/18736; all of these publications are incorporated by reference herein. The above enzymatic nucleic acid transcription units can be incorporated into a variety of vectors for introduction into mammalian cells, including but not restricted to, plasmid DNA vectors, viral DNA vectors (such as adenovirus or adeno-associated virus vectors), or viral RNA vectors (such as retroviral or alphavirus vectors) (for a review see Couture and Stinchcomb, 1996, supra).

[0198] In yet another aspect, the invention features an expression vector comprising nucleic acid sequence encoding at least one of the nucleic acid molecules of the invention, in a manner which allows expression of that nucleic acid molecule. The expression vector comprises in one embodiment; a) a transcription initiation region; b) a transcription termination region; c) a nucleic acid sequence encoding at least one said nucleic acid molecule; and wherein said sequence is operably linked to said initiation region and said termination region, in a manner which allows expression and/or delivery of said nucleic acid molecule. In another preferred embodiment the expression vector comprises: a) a transcription initiation region; b) a transcription termination region; c) an open reading frame; d) a nucleic acid sequence encoding at least one said nucleic acid molecule, wherein said sequence is operably linked to the 3′-end of said open reading frame; and wherein said sequence is operably linked to said initiation region, said open reading frame and said termination region, in a manner which allows expression and/or delivery of said nucleic acid molecule. In yet another embodiment, the expression vector comprises: a) a transcription initiation region; b) a transcription termination region; c) an intron; d) a nucleic acid sequence encoding at least one said nucleic acid molecule; and wherein said sequence is operably linked to said initiation region, said intron and said termination region, in a manner which allows expression and/or delivery of said nucleic acid molecule. In another embodiment, the expression vector comprises: a) a transcription initiation region; b) a transcription termination region; c) an intron; d) an open reading frame; e) a nucleic acid sequence encoding at least one said nucleic acid molecule, wherein said sequence is operably linked to the 3′-end of said open reading frame; and wherein said sequence is operably linked to said initiation region, said intron, said open reading frame and said termination region, in a manner which allows expression and/or delivery of said nucleic acid molecule.

### EXAMPLES

[0199] The following are non-limiting examples showing the selection, isolation, synthesis and activity of nucleic acids of the instant invention.

[0200] The following examples demonstrate the selection and design of Antisense, Hammerhead, DNAzyme, NCH, Amberzyme, Zinzyme or G-Cleaver enzymatic nucleic acid molecules and binding/cleavage sites within HBV RNA.

### Example 1

### Identification of Potential Target Sites in Human HBV RNA

[0201] The sequence of human HBV was screened for accessible sites using a computer-folding algorithm. Regions of the RNA that did not form secondary folding structures and contained potential enzymatic nucleic acid and/or antisense binding/cleavage sites were identified. The sequences of these cleavage sites are shown in Tables IV-XI.

### Example 2

### Selection of Enzymatic Nucleic Acid Cleavage Sites in Human HBV RNA

[0202] Enzymatic nucleic acid target sites were chosen by analyzing sequences of Human HBV (accession number: AF100308.1) and prioritizing the sites on the basis of folding. Enzymatic nucleic acids were designed that could bind each target and were individually analyzed by computer folding (Christoffersen et al., 1994 J. Mol. Struc. Theochem, 311, 273; Jaeger et al., 1989, Proc. Natl. Acad. Sci. USA, 86, 7706) to assess whether the enzymatic nucleic acid sequences fold into the appropriate secondary structure. Those enzymatic nucleic acids with unfavorable intramolecular interactions between the binding arms and the catalytic core were eliminated from consideration. As noted herein, varying binding arm lengths can be chosen to optimize activity. Generally, at least 5 bases on each arm are able to bind to, or otherwise interact with, the target RNA.

### Example 3

### Chemical Synthesis and Purification of Enzymatic Nucleic Acids and Antisense for Efficient Cleavage and/or Blocking of HBV RNA

[0203] Enzymatic nucleic acids and antisense constructs were designed to anneal to various sites in the RNA message. The binding arms of the enzymatic nucleic acids are complementary to the target site sequences described above, while the antisense constructs are fully complementary to the target site sequences described above. The enzymatic nucleic acids and antisense constructs were chemically synthesized. The method of synthesis used followed the procedure for normal RNA synthesis as described above and in Usman et al., (1987 J. Am. Chem. Soc., 109, 7845), Scaringe et al., (1990 Nucleic Acids Res., 18, 5433) and Wincott et al., supra, and made use of common nucleic acid protecting and coupling groups, such as dimethoxytrityl at the 5′-end, and phosphoramidites at the 3′-end. The average stepwise coupling yields were typically >98%.

[0204] Enzymatic nucleic acids and antisense constructs were also synthesized from DNA templates using bacteriophage T7 RNA polymerase (Milligan and Uhlenbeck, 1989, Methods Enzymol. 180, 51). Enzymatic nucleic acids and antisense constructs were purified by gel electrophoresis using general methods or were purified by high pressure liquid chromatography (HPLC; see Wincott et al., supra; the totality of which is hereby incorporated herein by reference) and were resuspended in water. The sequences of the chemically synthesized enzymatic nucleic acids used in this study are shown below in Table XI.

### Example 4

### Enzymatic Nucleic Acid Cleavage of HBV RNA Target in vitro

[0205] Enzymatic nucleic acids targeted to the human HBV RNA are designed and synthesized as described above. These enzymatic nucleic acids can be tested for cleavage activity in vitro, for example using the following procedure. The target sequences and the nucleotide location within the HBV RNA are given in Tables IV-XI.

[0206] Cleavage Reactions: Full-length or partially full-length, internally-labeled target RNA for enzymatic nucleic acid cleavage assay is prepared by in vitro transcription in the presence of [α-³²P] CTP, passed over a G 50 Sephadex® column by spin chromatography and used as substrate RNA without further purification. Alternately, substrates are 5′-³²P-end labeled using T4 polynucleotide kinase enzyme. Assays are performed by pre-warming a 2× concentration of purified enzymatic nucleic acid in enzymatic nucleic acid cleavage buffer (50 mM Tris-HCl, pH 7.5 at 37° C., 10 mM MgCl₂) and the cleavage reaction was initiated by adding the 2× enzymatic nucleic acid mix to an equal volume of substrate RNA (maximum of 1-5 nM) that was also pre-warmed in cleavage buffer. As an initial screen, assays are carried out for 1 hour at 37° C. using a final concentration of either 40 nM or 1 mM enzymatic nucleic acid, i.e., enzymatic nucleic acid excess. The reaction is quenched by the addition of an equal volume of 95% formamide, 20 mM EDTA, 0.05% bromophenol blue and 0.05% xylene cyanol after which the sample is heated to 95° C. for 2 minutes, quick chilled and loaded onto a denaturing polyacrylamide gel. Substrate RNA and the specific RNA cleavage products generated by enzymatic nucleic acid cleavage are visualized on an autoradiograph of the gel. The percentage of cleavage is determined by Phosphor Imager® quantitation of bands representing the intact substrate and the cleavage products.

### Example 5

### Transfection of HepG2 Cells with psHBV-1 and Enzymatic Nucleic Acids

[0207] The human hepatocellular carcinoma cell line Hep G2 was grown in Dulbecco's modified Eagle media supplemented with 10% fetal calf serum, 2 mM glutamine, 0.1 mM nonessential amino acids, 1 mM sodium pyruvate, 25 mM Hepes, 100 units penicillin, and 100 μg/ml streptomycin. To generate a replication competent cDNA, prior to transfection the HBV genomic sequences are excised from the bacterial plasmid sequence contained in the psHBV-1 vector (Those skilled in the art understand that other methods may be used to generate a replication competent cDNA). This was done with an EcoRI and Hind III restriction digest. Following completion of the digest, a ligation was performed under dilute conditions (20 μg/ml) to favor intermolecular ligation. The total ligation mixture was then concentrated using Qiagen spin columns.

[0208] Secreted alkaline phosphatase (SEAP) was used to normalize the HBsAg levels to control for transfection variability. The pSEAP2-TK control vector was constructed by ligating a Bgl II-Hind III fragment of the pRL-TK vector (Promega), containing the herpes simplex virus thymidine kinase promoter region, into Bgl II/Hind III digested pSEAP2-Basic (Clontech). Hep G2 cells were plated (3×10⁴ cells/well) in 96-well microtiter plates and incubated overnight. A lipid/DNA/enzymatic nucleic acid complex was formed containing (at final concentrations) cationic lipid (15 μg/ml), prepared psHBV-1 (4.5 μg/ml), pSEAP2-TK (0.5 μg/ml), and enzymatic nucleic acid (100 μM). Following a 15 min. incubation at 37° C., the complexes were added to the plated Hep G2 cells. Media was removed from the cells 96 hr. post-transfection for HBsAg and SEAP analysis.

[0209] Transfection of the human hepatocellular carcinoma cell line, Hep G2, with replication competent HBV DNA results in the expression of HBV proteins and the production of virions. To investigate the potential use of enzymatic nucleic acids for the treatment of chronic HBV infection, a series of enzymatic nucleic acids that target the 3′ terminus of the HBV genome have been synthesized. Enzymatic nucleic acids targeting this region have the potential to cleave all four major HBV RNA transcripts as well as the potential to block the production of HBV DNA by cleavage of the pregenomic RNA. To test the efficacy of these HBV enzymatic nucleic acids, they were co-transfected with HBV genomic DNA into Hep G2 cells, and the subsequent levels of secreted HBV surface antigen (HBsAg) were analyzed by ELISA. To control for variability in transfection efficiency, a control vector which expresses secreted alkaline phosphatase (SEAP), was also co-transfected. The efficacy of the HBV enzymatic nucleic acids was determined by comparing the ratio of HBsAg:SEAP and/or HBeAg:SEAP to that of a scrambled attenuated control (SAC) enzymatic nucleic acid. Twenty-five enzymatic nucleic acids (RPI18341, RPI18356, RPI18363, RPI18364, RPI18365, RPI18366, RPI18367, RPI18368, RPI18369, RPI18370, RPI18371, RPI18372, RPI18373, RPI18374, RPI18303, RPI18405, RPI18406, RPI18407, RPI18408, RPI18409, RPI18410, RPI18411, RPI18418, RPI18419, and RPI18422) have been identified which cause a reduction in the levels of HBsAg and/or HBeAg as compared to the corresponding SAC enzymatic nucleic acid. In addition, loop variant anti-HBV enzymatic nucleic acids targeting site 273 were tested using this system, the results of this study are summarized in FIG. 10. As indicated in the figure, the enzymatic nucleic acids tested demonstrate significant reduction in HepG2 HBsAg levels as compared to a scrambled attenuated core enzymatic nucleic acid control, with RPI 22650 and RPI 22649 showing the greatest decrease in HBsAg levels.

### Example 6

### Analysis of HBsAg and SEAP Levels Following Enzymatic Nucleic Acid Treatment

[0210] Immulon 4 (Dynax) microtiter wells were coated overnight at 4° C. with anti-HBsAg Mab (Biostride B88-95-31ad,ay) at 1 μg/ml in Carbonate Buffer (Na2CO3 15 mM, NaHCO3 35 mM, pH 9.5). The wells were then washed 4× with PBST (PBS, 0.05% Tween® 20) and blocked for 1 hr at 37° C. with PBST, 1% BSA. Following washing as above, the wells were dried at 37° C. for 30 min. Biotinylated goat ant-HBsAg (Accurate YVS1807) was diluted 1:1000 in PBST and incubated in the wells for 1 hr. at 37° C. The wells were washed 4× with PBST. Streptavidin/Alkaline Phosphatase Conjugate (Pierce 21324) was diluted to 250 ng/ml in PBST, and incubated in the wells for 1 hr. at 37° C. After washing as above, p-nitrophenyl phosphate substrate (Pierce 37620) was added to the wells, which were then incubated for 1 hr. at 37° C. The optical density at 405 nm was then determined. SEAP levels were assayed using the Great EscAPe® Detection Kit (Clontech K2041-1), as per the manufacturers instructions.

### Example 7

### X-gene Reporter Assay

[0211] The effect of enzymatic nucleic acid treatment on the level of transactivation of a SV40 promoter driven firefly luciferase gene by the HBV X-protein was analyzed in transfected Hep G2 cells. As a control for variability in transfection efficiency, a Renilla luciferase reporter driven by the TK promoter, which is not transactivated by the X protein, was used. Hep G2 cells were plated (3×10⁴ cells/well) in 96-well microtiter plates and incubated overnight. A lipid/DNA/enzymatic nucleic acid complex was formed containing (at final concentrations) cationic lipid (2.4 μg/ml), the X-gene vector pSBDR(2.5 μg/ml), the firefly reporter pSV40HCVluc (0.5 μg/ml), the Renilla luciferase control vector pRL-TK (0.5 μg/ml), and enzymatic nucleic acid (100 μM). Following a 15 min. incubation at 37° C., the complexes were added to the plated Hep G2 cells. Levels of firefly and Renilla luciferase were analyzed 48 hr. post transfection, using Promega's Dual-Luciferase Assay System.

[0212] The HBV X protein is a transactivator of a number of viral and cellular genes. Enzymatic nucleic acids which target the X region were tested for their ability to cause a reduction in X protein transactivation of a firefly luciferase gene driven by the SV40 promoter in transfected Hep G2 cells. As a control for transfection variability, a vector containing the Renilla luciferase gene driven by the TK promotor, which is not activated by the X protein, was included in the co-transfections. The efficacy of the HBV enzymatic nucleic acids was determined by comparing the ratio of firefly luciferase: Renilla luciferase to that of a scrambled attenuated control (SAC) enzymatic nucleic acid. Eleven enzymatic nucleic acids (RPI18365, RPI18367, RPI18368, RPI18371, RPI18372, RPI18373, RPI18405, RPI18406, RPI18411, RPI18418, RPI18423) were identified which cause a reduction in the level of transactivation of a reporter gene by the X protein, as compared to the corresponding SAC enzymatic nucleic acid.

### Example 8

### HBV Transgenic Mouse Study A

[0213] A transgenic mouse strain (founder strain 1.3.32 with a C57B1/6 background) that expresses HBV RNA and forms HBV viremia (Morrey et al., 1999, Antiviral Res., 42, 97-108; Guidotti et al., 1995, J. Virology, 69, 10, 6158-6169) was utilized to study the in vivo activity of enzymatic nucleic acids (RPI.18341, RPI.18371, RPI.18372, and RPI.18418) of the instant invention. This model is predictive in screening for anti-HBV agents. Enzymatic nucleic acid or the equivalent volume of saline was administered via a continuous s.c. infusion using Alzet® mini-osmotic pumps for 14 days. Alzet® pumps were filled with test material(s) in a sterile fashion according to the manufacturer's instructions. Prior to in vivo implantation, pumps were incubated at 37° C. overnight (≧18 hours) to prime the flow modulators. On the day of surgery, animals were lightly anesthetized with a ketamine/xylazine cocktail (94 mg/kg and 6 mg/kg, respectively; 0.3 ml, IP). Baseline blood samples (200 μl) were obtained from each animal via a retro-orbital bleed. For animals in groups 1-5 (Table XII), a 2 cm area near the base of the tail was shaved and cleansed with betadine surgical scrub and sequentially with 70% alcohol. A 1 cm incision in the skin was made with a #15 scalpel blade or a blunt pair of scissors near the base of the tail. Forceps were used to open a pocket rostrally (i.e., towards the head) by spreading apart the subcutaneous connective tissue. The pump was inserted with the delivery portal pointing away from the incision. Wounds were closed with sterile 9-mm stainless steel clips or with sterile 4-0 suture. Animals were then allowed to recover from anesthesia on a warm heating pad before being returned to their cage. Wounds were checked daily. Clips or sutures were replaced as needed. Incisions typically healed completely within 7 days post-op. Animals were then deeply anesthetized with the ketamine/xylazine cocktail (150 mg/kg and 10 mg/kg, respectively; 0.5 ml, IP) on day 14 post pump implantation. A midline thoracotomy/laparatomy was performed to expose the abdominal cavity and the thoracic cavity. The left ventricle was cannulated at the base and animals exsanguinated using a 23G needle and 1 ml syringe. Serum was separated, frozen and analyzed for HBV DNA and antigen levels. Experimental groups were compared to the saline control group in respect to percent change from day 0 to day 14. HBV DNA was assayed by quantitative PCR.

### RESULTS

[0214] Table XII is a summary of the group designation and dosage levels used in this HBV transgenic mouse study. Baseline blood samples were obtained via a retroorbital bleed and animals (N=10/group) received anti-HBV enzymatic nucleic acids (100 mg/kg/day) as a continuous SC infusion. After 14 days, animals treated with a enzymatic nucleic acid targeting site 273 (RPI.18341) of the HBV RNA showed a significant reduction in serum HBV DNA concentration, compared to the saline treated animals as measured by a quantitative PCR assay. More specifically, the saline treated animals had a 69% increase in serum HBV DNA concentrations over this 2-week period while treatment with the 273 enzymatic nucleic acid (RPI.18341) resulted in a 60% decrease in serum HBV DNA concentrations. Enzymatic nucleic acids directed against sites 1833 (RPI.18371), 1873 (RPI.18418), and 1874 (RPI.18372) decreased serum HBV DNA concentrations by 49%, 15% and 16%, respectively.

### Example 9

### HBV Transgenic Mouse Study B

[0215] A transgenic mouse strain (founder strain 1.3.32 with a C57B1/6 background) that expresses HBV RNA and forms HBV viremia (Morrey et al, 1999, Antiviral Res., 42, 97-108; Guidotti et al., 1995, J. Virology, 69, 10, 6158-6169) was utilized to study the in vivo activity of enzymatic nucleic acids (RPI.18341 and RPI.18371) of the instant invention. This model is predictive in screening for anti-HBV agents. Enzymatic nucleic acid or the equivalent volume of saline was administered via a continuous s.c. infusion using Alzet® mini-osmotic pumps for 14 days. Alzet® pumps were filled with test material(s) in a sterile fashion according to the manufacturer's instructions. Prior to in vivo implantation, pumps were incubated at 37° C. overnight (≧18 hours) to prime the flow modulators. On the day of surgery, animals were lightly anesthetized with a ketamine/xylazine cocktail (94 mg/kg and 6 mg/kg, respectively; 0.3 ml, IP). Baseline blood samples (200 μl) were obtained from each animal via a retro-orbital bleed. For animals in groups 1-10 (Table XIII), a 2 cm area near the base of the tail was shaved and cleansed with betadine surgical scrub and sequentially with 70% alcohol. A 1 cm incision in the skin was made with a #15 scalpel blade or a blunt pair of scissors near the base of the tail. Forceps were used to open a pocket rostrally (i.e., towards the head) by spreading apart the subcutaneous connective tissue. The pump was inserted with the delivery portal pointing away from the incision. Wounds were closed with sterile 9-mm stainless steel clips or with sterile 4-0 suture. Animals were then allowed to recover from anesthesia on a warm heating pad before being returned to their cage. Wounds were checked daily. Clips or sutures were replaced as needed. Incisions typically healed completely within 7 days post-op. Animals were then deeply anesthetized with the ketamine/xylazine cocktail (150 mg/kg and 10 mg/kg, respectively; 0.5 ml, IP) on day 14 post pump implantation. A midline thoracotomy/laparatomy was performed to expose the abdominal cavity and the thoracic cavity. The left ventricle was cannulated at the base and animals exsanguinated using a 23G needle and 1 ml syringe. Serum was separated, frozen and analyzed for HBV DNA and antigen levels. Experimental groups were compared to the saline control group in respect to percent change from day 0 to day 14. HBV DNA was assayed by quantitative PCR. Additionally, mice treated with 3TC® by oral gavage at a dose of 300 mg/kg/day for 14 days (group 11, Table XIII) were used as a positive control.

### RESULTS

[0216] Table XIII is a summary of the group designation and dosage levels used in this HBV transgenic mouse study. Baseline blood samples were obtained via a retroorbital bleed and animals (N=15/group) received anti-HBV enzymatic nucleic acids (100 mg/kg/day, 30 mg/kg/day, 10 mg/kg/day) as a continuous SC infusion. The results of this study are summarized in FIGS. 6, 7, and 8. As FIGS. 6, 7, and 8 demonstrate, Enzymatic nucleic acids directed against sites 273 (RPI.18341) and 1833 (RPI.18371) demonstrate reduction in the serum HBV DNA levels following 14 days of enzymatic nucleic acid treatment in HBV transgenic mice, as compared to scrambled attenuated core (SAC) enzymatic nucleic acid and saline controls. Furthermore, these enzymatic nucleic acids provide similar, and in some cases, greater reduction of serum HBV DNA levels, as compared to the 3TC® positive control, at lower doses than the 3TC® positive control.

### Example 10

### HBV DNA Reduction in HepG2.2.15 cells

[0217] Enzymatic nucleic acid treatment of HepG2.2.15 cells was performed in a 96-well plate format, with 12 wells for each different enzymatic nucleic acid tested (RPI.18341, RPI.18371, RPI.18372, RPI.18418, RPI.20599SAC). HBV DNA levels in the media collected between 120 and 144 hours following transfection was determined using the Roche Amplicor HBV Assay. Treatment with RPI.18341 targeting site 273 resulted in a significant (P<0.05) decrease in HBV DNA levels of 62% compared to the SAC (RPI.20599). Treatment with RPI.18371 (site 1833) or RPI.18372 (site 1874) resulted in reductions in HBV DNA levels of 55% and 58% respectively, as compared to treatment with the SAC RPI.20599 (see FIG. 9).

### Example 11

### RPI 18341 Combination Treatment with Lamivudine/Infergen®

[0218] The therapeutic use of nucleic acid molecules of the invention either alone or in combination with current therapies, for example lamivudine or type 1 IFN, can lead to improved HBV treatment modalities. To assess the potential of combination therapy, HepG2 cells transfected with a replication competent HBV cDNA, were treated with RPI 18341(HepBzyme™), Infergen® (Amgen, Thousand Oaks Calif.), and/or Lamivudine (Epivir®: GlaxoSmithKline, Research Triangle Park N.C.) either alone or in combination. Results indicated that combination treatment with either RPI 18341 plus Infergen® or combination of RPI 18341 plus lamivudine results in additive down regulation of HBsAg expression (P<0.001). These studies can be applied to the treatment of lamivudine resistant cells to further assses the potential for combination therapy of RPI 18341 plus currently available therapies for the treatment of chronic Hepatitis B.

[0219] Hep G2 cells were plated (2×104 cells/well) in 96-well microtiter plates and incubated overnight. A cationic lipid/DNA/enzymatic nucleic acid complex was formed containing (at final concentrations) lipid (11-15 μg/mL), re-ligated psHBV-1 (4.5 μg/mL) and enzymatic nucleic acid (100-200 nM) in growth media. Following a 15 min incubation at 37° C., 20 μL of the complex was added to the plated Hep G2 cells in 80 μL of growth media minus antibiotics. For combination treatment with interferon, interferon (Infergen®, Amgen, Thousand Oaks Calif.) was added at 24 hr post-transfection and then incubated for an additional 96 hr. In the case of co-treatment with Lamivudine (3TC®), the enzymatic nucleic acid-containing cell culture media was removed at 120 hr post-transfection, fresh media containing Lamivudine (Epivir®: GlaxoSmithKline, Research Triangle Park N.C.) was added, and then incubated for an additional 48 hours. Treatment with Lamivudine or interferon individually was done on Hep G2 cells transfected with the pSHBV-1 vector alone and then treated identically to the co-treated cells. All transfections were performed in triplicate. Analysis of HBsAg levels was performed using the Diasorin HBsAg ELISA kit.

### RESULTS

[0220] At either 500 or 1000 units of Infergen®, the addition of 200 nM of RPI.18341 results in a 75-77% increase in anti-HBV activity as judged by the level of HBsAg secreted from the treated Hep G2 cells. Conversely, the anti-HBV activity of RPI.18341 (at 200 nM) is increased 31-39% when used in combination of 500 or 1000 units of Infergen® (FIG. 11).

[0221] At 25 nM Lamivudine (3TC®), the addition of 100 nM of RPI.18341 results in a 48% increase in anti-HBV activity as judged by the level of HBsAg secreted from treated Hep G2 cells. Conversely, the anti-HBV activity of RPI.18341 (at 100 nM) is increased 31% when used in combination with 25 nM Lamivudine (FIG. 12).

### Example 12

### RPI 18341 Treatment in Cells Expressing Lamivudine Resistant HBV

[0222] Antiviral therapy with Lamivudine can lead to development of viral resistance and subsequent viral rebound in patients with HBV infention. Viral resistance has been seen in 15% to 30% of HBV patients undergoing Lamivudine treatment for a period of one year. HBV resistance to Lamivudine is associated with characteristic mutations in the conserved tyrosine, methionine, aspartate, aspartate (YMDD) amino acid motif of viral polymerase. The most frequently described mutation leading to Lamivudine resistance is the substitution of valine or isoleucine for methionine at residue 552. Additional mutations in adjacent areas, including mutations at residues 528 and 555, have been detected and may also be involved in Lamivudine and/or other nucleoside resistance

[0223] To assess the efficacy of enzymatic nucleic acid molecules against Lamivudine resistant HBV, cells that express Lamivudine resistant HBV, Hep G2DM2 cells, (see for example Fu and Cheng, 2000, Antimicrobial Agents and Chemotherapy, 44, 3402-3407) were treated with RPI 18341 (HepBzyme™) at a concentration of 150 nM. Treatment with RPI 18341 results in down regulation of HBsAg expression similar to that observed in Heg G2 cells expressing wildtype HBV (FIG. 13). This data indicates that enzymatic nucleic acid molecules, whether used alone or in combination with Lamivudine, are active against HBV resistance mutations that develop in nearly one third of patients within one year of beginning treatment with lamivudine. These results indicate that treatment with enzmatic nucleic acid molecules can be a potential new therapeutic option for patients with chronic hepatitis B infection.

### Example 13

### “No-ribo” Enzymatic Nucleic Acid Molecule Targeting HBV

[0224] To improve stability, efficacy and pharmacokinetic properties of enzymatic nucleic acid molecules targeting HBV, an enzymatic nucleic acid molecule targeting site 273 of the HBV pregenomic RNA was designed such that the enzymatic nucleic acid molecule completely lacked any ribonucleotides (RPI 25516 in Table XI, see also FIG. 14) by substituting ribonucleotides with 2′-O-methyl ribonucleotides. This enzymatic nucleic acid molecule lacking ribonucleotides demonstrates high levels of anti-HBV activity in the HBsAg ELISA cell culture system compared to binding attenuated (BAC, RPI 25535) and scrambled attenuated (SAC, RPI 25536) controls (see FIG. 15). In addition, the no-ribo enzymatic nucleic acid molecule demonstrates improved activity in the HBsAg ELISA cell culture system compared to HepBzyme (RPI 18341) which has 5 ribonucleotides.

### Cell Culture Models

[0225] As previously mentioned, HBV does not infect cells in culture. However, transfection of HBV DNA (either as a head-to-tail dimer or as an “overlength” genome of >100%) into HuH7 or Hep G2 hepatocytes results in viral gene expression and production of HBV virions released into the media. Thus, HBV replication competent DNA can be co-transfected with enzymatic nucleic acids in cell culture. Such an approach has been used to report intracellular enzymatic nucleic acid activity against HBV (zu Putlitz, et al., 1999, J. Virol., 73, 5381-5387, and Kim et al., 1999, Biochem. Biophys. Res. Commun., 257, 759-765). In addition, stable hepatocyte cell lines have been generated that express HBV. Enzymatic nucleic acid is delivered to these cell lines; however, such an assay requires the performance of a delivery screen. Intracellular HBV gene expression can be assayed by a Taqman® assay for HBV RNA or by ELISA for HBV protein. Extracellular virus can be assayed by PCR for DNA or ELISA for protein. Antibodies are commercially available for HBV surface antigen and core protein. A secreted alkaline phosphatase expression plasmid can be used to normalize for differences in transfection efficiency and sample recovery.

[0226] Animal Models

[0227] There are several small animal models to study HBV replication. One is the transplantation of HBV-infected liver tissue into irradiated mice. Viremia (as evidenced by measuring HBV DNA by PCR) is first detected 8 days after transplantation and peaks between 18-25 days (Ilan et al., 1999, Hepatology, 29, 553-562).

[0228] Transgenic mice that express HBV have also been used as a model to evaluate potential anti-virals. HBV DNA is detectable in both liver and serum (Guidotti et al., 1995, J. Virology, 69, 10, 6158-6169; Morrey et al., 1999, Antiviral Res., 42, 97-108).

[0229] An additional model is to establish subcutaneous tumors in nude mice with Hep G2 cells transfected with HBV. Tumors develop in about 2 weeks after inoculation and express HBV surface and core antigens. HBV DNA and surface antigen is also detected in the circulation of tumor-bearing mice (Yao et al., 1996, J. Viral Hepat., 3, 19-22).

[0230] Woodchuck hepatitis virus (WHV) is closely related to HBV in its virus structure, genetic organization, and mechanism of replication. As with HBV in humans, persistent WHV infection is common in natural woodchuck populations and is associated with chronic hepatitis and hepatocellular carcinoma (HCC). Experimental studies have established that WHV causes HCC in woodchucks and woodchucks chronically infected with WHV have been used as a model to test a number of anti-viral agents. For example, the nucleoside analogue 3T3 was observed to cause dose dependent reduction in virus (50% reduction after two daily treatments at the highest dose) (Hurwitz et al., 1998. Antimicrob. Agents Chemother., 42, 2804-2809).

[0231] Indications

[0232] Particular degenerative and disease states that can be associated with HBV expression modulation include but are not limited to, HBV infection, hepatitis, cancer, tumorigenesis, cirrhosis, liver failure and others.

[0233] The present body of knowledge in HBV research indicates the need for methods to assay HBV activity and for compounds that can regulate HBV expression for research, diagnostic, and therapeutic use.

[0234] Lamivudine (3TC®), L-FMAU, adefovir dipivoxil, type 1 Interferon, therapeutic vaccines, steriods, and 2′-5′ Oligoadenylates are non-limiting examples of pharmaceutical agents that can be combined with or used in conjunction with the nucleic acid molecules (e.g. enzymatic nucleic acids and antisense molecules) of the instant invention. Those skilled in the art will recognize that other drugs or other therapies can similarly and readily be combined with the nucleic acid molecules of the instant invention (e.g. enzymatic nucleic acids and antisense molecules) and are, therefore, within the scope of the instant invention.

### Diagnostic Uses

[0235] The nucleic acid molecules of this invention (e.g., enzymatic nucleic acids) can be used as diagnostic tools to examine genetic drift and mutations within diseased cells or to detect the presence of HBV RNA in a cell. The close relationship between enzymatic nucleic acid activity and the structure of the target RNA allows the detection of mutations in any region of the molecule which alters the base-pairing and three-dimensional structure of the target RNA. By using multiple enzymatic nucleic acids described in this invention, one can map nucleotide changes which are important to RNA structure and function in vitro, as well as in cells and tissues. Cleavage of target RNAs with enzymatic nucleic acids can be used to inhibit gene expression and define the role (essentially) of specified gene products in the progression of disease. In this manner, other genetic targets can be defined as important mediators of the disease. These experiments will lead to better treatment of the disease progression by affording the possibility of combinational therapies (e.g., multiple enzymatic nucleic acids targeted to different genes, enzymatic nucleic acids coupled with known small molecule inhibitors, or intermittent treatment with combinations of enzymatic nucleic acids and/or other chemical or biological molecules). Other in vitro uses of enzymatic nucleic acids of this invention are well known in the art, and include detection of the presence of mRNAs associated with HBV-related condition. Such RNA is detected by determining the presence of a cleavage product after treatment with a enzymatic nucleic acid using standard methodology.

[0236] In a specific example, enzymatic nucleic acids which cleave only wild-type or mutant forms of the target RNA are used for the assay. The first enzymatic nucleic acid is used to identify wild-type RNA present in the sample and the second enzymatic nucleic acid is used to identify mutant RNA in the sample. As reaction controls, synthetic substrates of both wild-type and mutant RNA are cleaved by both enzymatic nucleic acids to demonstrate the relative enzymatic nucleic acid efficiencies in the reactions and the absence of cleavage of the “non-targeted” RNA species. The cleavage products from the synthetic substrates also serve to generate size markers for the analysis of wild-type and mutant RNAs in the sample population. Thus each analysis involves two enzymatic nucleic acids, two substrates and one unknown sample which is combined into six reactions. The presence of cleavage products is determined using an RNAse protection assay so that full-length and cleavage fragments of each RNA is analyzed in one lane of a polyacrylamide gel. It is not absolutely required to quantify the results to gain insight into the expression of mutant RNAs and putative risk of the desired phenotypic changes in target cells. The expression of mRNA whose protein product is implicated in the development of the phenotype (i.e., HBV) is adequate to establish risk. If probes of comparable specific activity are used for both transcripts, then a qualitative comparison of RNA levels is adequate and decreases the cost of the initial diagnosis. Higher mutant form to wild-type ratios is correlated with higher risk whether RNA levels are compared qualitatively or quantitatively.

[0237] Additional Uses

[0238] Potential usefulness of sequence-specific enzymatic nucleic acid molecules of the instant invention might have many of the same applications for the study of RNA that DNA restriction endonucleases have for the study of DNA (Nathans et al., 1975 Ann. Rev. Biochem. 44:273). For example, the pattern of restriction fragments can be used to establish sequence relationships between two related RNAs, and large RNAs can be specifically cleaved to fragments of a size more useful for study. The ability to engineer sequence specificity of the enzymatic nucleic acid molecule is ideal for cleavage of RNAs of unknown sequence. Applicant describes the use of nucleic acid molecules to down-regulate gene expression of target genes in bacterial, microbial, fungal, viral, and eukaryotic systems including plant, or mammalian cells.

[0239] All patents and publications mentioned in the specification are indicative of the levels of skill of those skilled in the art to which the invention pertains. All references cited in this disclosure are incorporated by reference to the same extent as if each reference had been incorporated by reference in its entirety individually.

[0240] One skilled in the art would readily appreciate that the present invention is well adapted to carry out the objects and obtain the ends and advantages mentioned, as well as those inherent therein. The methods and compositions described herein as presently representative of preferred embodiments are exemplary and are not intended as limitations on the scope of the invention. Changes therein and other uses will occur to those skilled in the art, which are encompassed within the spirit of the invention, are defined by the scope of the claims.

[0241] It will be readily apparent to one skilled in the art that varying substitutions and modifications may be made to the invention disclosed herein without departing from the scope and spirit of the invention. Thus, such additional embodiments are within the scope of the present invention and the following claims.

[0242] The invention illustratively described herein suitably may be practiced in the absence of any element or elements, limitation or limitations which is not specifically disclosed herein. Thus, for example, in each instance herein any of the terms “comprising”, “consisting essentially of” and “consisting of” may be replaced with either of the other two terms. The terms and expressions which have been employed are used as terms of description and not of limitation, and there is no intention that in the use of such terms and expressions of excluding any equivalents of the features shown and described or portions thereof, but it is recognized that various modifications are possible within the scope of the invention claimed. Thus, it should be understood that although the present invention has been specifically disclosed by preferred embodiments, optional features, modification and variation of the concepts herein disclosed may be resorted to by those skilled in the art, and that such modifications and variations are considered to be within the scope of this invention as defined by the description and the appended claims.

[0243] In addition, where features or aspects of the invention are described in terms of Markush groups or other grouping of alternatives, those skilled in the art will recognize that the invention is also thereby described in terms of any individual member or subgroup of members of the Markush group or other group.

[0244] Other embodiments are within the following claims.

TABLE I
I.
Characteristics of naturally occurring enzymatic nucleic acids

Group I Introns
Size: ˜150 to >1000 nucleotides.
Requires a U in the target sequence immediately 5′ of the cleavage site.
Binds 4-6 nucleotides at the 5′-side of the cleavage site.
Reaction mechanism: attack by the 3′-OH of guanosine to generate
cleavage products with 3′-OH and 5′-guanosine.
Additional protein cofactors required in some cases to help folding and
maintainance of the active structure.
Over 300 known members of this class. Found as an intervening sequence
in Tetrahymena thermophila rRNA, fungal mitochondria, chloroplasts,
phage T4, blue-green algae, and others.
Major structural features largely established through phylogenetic
comparisons, mutagenesis, and biochemical studies [ⁱ,ⁱⁱ].
Complete kinetic framework established for one ribozyme [ⁱⁱⁱ,^{iv},^{v},^{vi}].
Studies of ribozyme folding and substrate docking underway [^{vii},^{viii},^{ix}].
Chemical modification investigation of important residues well estab-
lished [^{x},^{xi}].
The small (4-6 nt) binding site may make this ribozyme too non-specific
for targeted RNA cleavage, however, the Tetrahymena group I intron
has been used to repair a “defective” β-galactosidase message by the
ligation of new β-galactosidase sequences onto the defective mes-
sage [^{xii}].
Size: ˜290 to 400 nucleotides.
RNA portion of a ubiquitous ribonucleoprotein enzyme.
Cleaves tRNA precursors to form mature tRNA [^{xiii}].
Reaction mechanism: possible attack by M²⁺-OH to generate cleavage
products with 3′-OH and 5′-phosphate.
RNAse P is found throughout the prokaryotes and eukaryotes. The RNA
subunit has been sequenced from bacteria, yeast, rodents, and primates.
Recruitment of endogenous RNAse P for therapeutic applications is pos-
sible through hybridization of an External Guide Sequence (EGS) to the
target RNA [^{xiv},^{xv}]
Important phosphate and 2′ OH contacts recently identified [^{xvi},^{xvii}]
Group II Introns
Size: >1000 nucleotides.
Trans cleavage of target RNAs recently demonstrated [^{xviii},^{xix}].
Sequence requirements not fully determined.
Reaction mechanism: 2′-OH of an internal adenosine generates cleavage
products with 3′-OH and a “lariat” RNA containing a 3′-5′ and a
2′-5′ branch point.
Only natural ribozyme with demonstrated participation in DNA cleav-
age [^{xx},^{xxi}] in addition to RNA cleavage and ligation.
Major structural features largely established through phylogenetic
comparisons [^{xxii}].
Important 2′ OH contacts beginning to be identified [^{xxiii}]
Kinetic framework under development [^{xxiv}]
Neurospora VS RNA
Size: ˜144 nucleotides.
Trans cleavage of hairpin target RNAs recently demonstrated [^{xxv}].
Sequence requirements not fully determined.
Reaction mechanism: attack by 2′-OH 5′ to the scissile bond to generate
cleavage products with 2′,3′-cyclic phosphate and 5′-OH ends.
Binding sites and structural requirements not fully determined.
Only 1 known member of this class. Found in Neurospora VS RNA.
Hammerhead Ribozyme
(see text for references)
Size: ˜13 to 40 nucleotides.
Requires the target sequence UH immediately 5′ of the cleavage site.
Binds a variable number nucleotides on both sides of the cleavage site.
Reaction mechanism: attack by 2′-OH 5′ to the scissile bond to generate
cleavage products with 2′,3′-cyclic phosphate and 5′-OH ends.
14 known members of this class. Found in a number of plant pathogens
(virusoids) that use RNA as the infectious agent.
Essential structural features largely defined, including 2 crystal struc-
tures [^{xxvi},^{xxvii}]
Minimal ligation activity demonstrated (for engineering through in vitro
selection) [^{xxviii}]
Complete kinetic framework established for two or more ribozymes [^{xxix}].
Chemical modification investigation of important residues well estab-
lished [^{xxx}].
Hairpin Ribozyme
Size: ˜50 nucleotides.
Requires the target sequence GUC immediately 3′ of the cleavage site.
Binds 4-6 nucleotides at the 5′-side of the cleavage site and a variable
number to the 3′-side of the cleavage site.
Reaction mechanism: attack by 2′-OH 5′ to the scissile bond to
generate cleavage products with 2′,3′-cyclic phosphate and 5′-OH ends.
3 known members of this class. Found in three plant pathogen (satellite
RNAs of the tobacco ringspot virus, arabis mosaic virus and chicory
yellow mottle virus) which uses RNA as the infectious agent.
Essential structural features largely defined [^{xxxi},^{xxxii},^{xxxiii},^{xxxiv}]
Ligation activity (in addition to cleavage activity) makes ribozyme
amenable to engineering through in vitro selection [^{xxxv}]
Complete kinetic framework established for one ribozyme [^{xxxvi}].
Chemical modification investigation of important residues
begun [^{xxxvii},^{xxxviii}].
Hepatitis Delta Virus (HDV) Ribozyme
Size: ˜60 nucleotides.
Trans cleavage of target RNAs demonstrated [^{xxxix}].
Binding sites and structural requirements not fully determined, although no
sequences 5′ of cleavage site are required. Folded ribozyme contains a
pseudoknot structure [^{xl}].
Reaction mechanism: attack by 2′-OH 5′ to the scissile bond to generate
cleavage products with 2′,3′-cyclic phosphate and 5′-OH ends.
Only 2 known members of this class. Found in human HDV.
^{xli}Circular form of HDV is active and shows increased nuclease stabil-
ity [xlii]
ⁱMichel, Francois; Westhof, Eric. Slippery substrates. Nat. Struct. Biol. (1994), 1(1), 5-7.
ⁱⁱLisacek, Frederique; Diaz, Yolande; Michel, Francois. Automatic identification of group I intron cores in genomic DNA sequences. J. Mol. Biol. (1994), 235(4), 1206-17.
ⁱⁱⁱHerschlag, Daniel; Cech, Thomas R.. Catalysis of RNA cleavage by the Tetrahymena thermophila ribozyme. 1. Kinetic description of the reaction of an RNA substrate complementary to the active site. Biochemistry (1990), 29(44), 10159-71.
^{iv}Herschlag, Daniel; Cech, Thomas R.. Catalysis of RNA cleavage by the Tetrahymena thermophila ribozyme. 2. Kinetic description of the reaction of an RNA substrate that forms a mismatch at the active site. Biochemistry (1990), 29(44), 10172-80.
^{v}Knitt, Deborah S.; Herschlag, Daniel. pH Dependencies of the Tetrahymena Ribozyme Reveal an Unconventional Origin of an Apparent pKa. Biochemistry (1996), 35(5), 1560-70.
^{vi}Bevilacqua, Philip C.; Sugimoto, Naoki; Turner, Douglas H.. A mechanistic framework for the second step of splicing catalyzed by the Tetrahymena ribozyme. Biochemistry (1996), 35(2), 648-58.
^{vii}Li, Yi; Bevilacqua, Philip C.; Mathews, David; Turner, Douglas H.. Thermodynamic and activation parameters for binding of a pyrene-labeled substrate by the Tetrahymena ribozyme: docking is not diffusion-controlled and is driven by a favorable entropy change. Biochemistry (1995), 34(44), 14394-9.
^{viii}Banerjee, Aloke Raj; Turner, Douglas H.. The time dependence of chemical modification reveals slow steps in the folding of a group I ribozyme. Biochemistry (1995), 34(19), 6504-12.
^{ix}Zarrinkar, Patrick P.; Williamson, James R.. The P9.1-P9.2 peripheral extension helps guide folding of the Tetrahymena ribozyme. Nucleic Acids Res. (1996), 24(5), 854-8.
^{x}Strobel, Scott A.; Cech, Thomas R.. Minor groove recognition of the conserved G.cntdot.U pair at the Tetrahymena ribozyme reaction site. Science (Washington, D.C.) (1995), 267(5198), 675-9.
^{xi}Strobel, Scott A.; Cech, Thomas R.. Exocyclic Amine of the Conserved G.cntdot.U Pair at the Cleavage Site of the Tetrahymena Ribozyme Contributes to 5′-Splice Site Selection and Transition State Stabilization. Biochemistry (1996), 35(4), 1201-11.
^{xii}Sullenger, Bruce A.; Cech, Thomas R.. Ribozyme-mediated repair of defective mRNA by targeted trans-splicing. Nature (London) (1994), 371 (6498), 619-22.
^{xiii}Robertson, H. D.; Altman, S.; Smith, J. D. J. Biol. Chem., 247, 5243-5251 (1972).
^{xiv}Forster, Anthony C.; Altman, Sidney. External guide sequences for an RNA enzyme. Science (Washington, D.C., 1883-) (1990), 249(4970), 783-6.
^{xv}Yuan, Y.; Hwang, E. S.; Altman, S. Targeted cleavage of mRNA by human RNase P. Proc. Natl. Acad. Sci. USA (1992) 89, 8006-10.
^{xvi}Harris, Michael E.; Pace, Norman R.. Identification of phosphates involved in catalysis by the ribozyme RNase P RNA. RNA (1995), 1(2), 210-18.
^{xvii}Pan, Tao; Loria, Andrew; Zhong, Kun. Probing of tertiary interactions in RNA: 2′-hydroxyl-base contacts between the RNase P RNA and pre-tRNA. Proc. Natl. Acad. Sci. U.S.A. (1995), 92(26), 12510-14.
^{xviii}Pyle, Anna Marie; Green, Justin B.. Building a Kinetic Framework for Group II Intron Ribozyme Activity: Quantitation of Interdomain Binding and Reaction Rate. Biochemistry (1994), 33(9), 2716-25.
^{xix}Michels, William J. Jr.; Pyle, Anna Marie. Conversion of a Group II Intron into a New Multiple-Turnover Ribozyme that Selectively Cleaves Oligonucleotides: Elucidation of Reaction Mechanism and Structure/Function Relationships. Biochemistry (1995), 34(9), 2965-77.
^{xx}Zimmerly, Steven; Guo, Huatao; Eskes, Robert; Yang, Jian; Perlman, Philip S.; Lambowitz, Alan M.. A group II intron RNA is a catalytic component of a DNA endonuclease involved in intron mobility. Cell (Cambridge, Mass.) (1995), 83(4), 529-38.
^{xxi}Griffin, Edmund A., Jr.; Qin, Zhifeng; Michels, Williams J., Jr.; Pyle, Anna Marie. Group II intron ribozymes that cleave DNA and RNA linkages with similar efficiency, and lack contacts with substrate 2′-hydroxyl groups. Chem. Biol. (1995), 2(11), 761-70.
^{xxii}Michel, Francois; Ferat, Jean Luc. Structure and activities of group II introns. Annu. Rev. Biochem. (1995), 64, 435-61.
^{xxiii}Abramovitz, Dana L.; Friedman, Richard A.; Pyle, Anna Marie. Catalytic role of 2′-hydroxyl groups within a group II intron active site. Science (Washington, D.C.) (1996), 271 (5254), 1410-13.
^{xxiv}Daniels, Danette L.; Michels, William J., Jr.; Pyle, Anna Marie. Two competing pathways for self-splicing by group II introns: a quantitative analysis of in vitro reaction rates and products. J. Mol. Biol. (1996), 256(1), 31-49.
^{xxv}Guo, Hans C. T.; Collins, Richard A.. Efficient trans-cleavage of a stem-loop RNA substrate by a ribozyme derived from Neurospora VS RNA. EMBO J. (1995), 14(2), 368-76.
^{xxvi}Scott, W. G., Finch, J. T., Aaron, K. The crystal structure of an all RNA hammerhead ribozyme: A proposed mechanism for RNA catalytic cleavage. Cell, (1995), 81, 991-1002.
^{xxvii}McKay, Structure and function of the hammerhead ribozyme: an unfinished story. RNA, (1996), 2, 395-403.
^{xxviii}Long, D., Uhlenbeck, O., Hertel, K. Ligation with hammerhead ribozymes. U.S. Pat. No. 5,633,133.
^{xxix}Hertel, K. J., Herschlag, D., Uhlenbeck, O. A kinetic and thermodynamic framework for the hammerhead ribozyme reaction. Biochemistry, (1994) 33, 3374-3385. Beigelman, L., et al., Chemical modifications of hammerhead ribozymes. J. Biol. Chem., (1995) 270, 25702-25708.
^{xxx}Beigelman, L., et al., Chemical modifications of hammerhead ribozymes. J. Biol. Chem., (1995) 270, 25702-25708.
^{xxxi}Hampel, Arnold; Tritz, Richard; Hicks, Margaret; Cruz, Phillip. ‘Hairpin’ catalytic RNA model: evidence for helixes and sequence requirement for substrate RNA. Nucleic Acids Res. (1990), 18(2), 299-304.
^{xxxii}Chowrira, Bharat M.; Berzal-Herranz, Alfredo; Burke, John M.. Novel guanosine requirement for catalysis by the hairpin ribozyme. Nature (London) (1991), 354(6351), 320-2.
^{xxxiii}Berzal-Herranz, Alfredo; Joseph, Simpson; Chowrira, Bharat M.; Butcher, Samuel E.; Burke, John M.. Essential nucleotide sequences and secondary structure elements of the hairpin ribozyme. EMBO J. (1993), 12(6), 2567-73.
^{xxxiv}Joseph, Simpson; Berzal-Herranz, Alfredo; Chowrira, Bharat M.; Butcher, Samuel E.. Substrate selection rules for the hairpin ribozyme determined by in vitro selection, mutation, and analysis of mismatched substrates. Genes Dev. (1993), 7(1), 130-8.
^{xxxv}Berzal-Herranz, Alfredo; Joseph, Simpson; Burke, John M.. In vitro selection of active hairpin ribozymes by sequential RNA-catalyzed cleavage and ligation reactions. Genes Dev. (1992), 6(1), 129-34.
^{xxxvi}Hegg, Lisa A.; Fedor, Martha J.. Kinetics and Thermodynamics of Intermolecular Catalysis by Hairpin Ribozymes. Biochemistry (1995), 34(48), 15813-28.
^{xxxvii}Grasby, Jane A.; Mersmann, Karin; Singh, Mohinder; Gait, Michael J.. Purine Functional Groups in Essential Residues of the Hairpin Ribozyme Required for Catalytic Cleavage of RNA. Biochemistry (1995), 34(12), 4068-76.
^{xxxviii}Schmidt, Sabine; Beigelman, Leonid; Karpeisky, Alexander; Usman, Nassim; Sorensen, Ulrik S.; Gait, Michael J.. Base and sugar requirements for RNA cleavage of essential nucleoside residues in internal loop B of the hairpin ribozyme: implications for secondary structure. Nucleic Acids Res. (1996), 24(4), 573-81.
^{xxxix}Perrotta, Anne T.; Been, Michael D.. Cleavage of oligoribonucleotides by a ribozyme derived from the hepatitis .delta. virus RNA sequence. Biochemistry (1992), 31(1), 16-21.
^{xl}Perrotta, Anne T.; Been, Michael D.. A pseudoknot-like structure required for efficient self-cleavage of hepatitis delta virus RNA. Nature (London) (1991), 350(6317), 434-6.
^{xli}
^{xlii}Puttaraju, M.; Perrotta, Anne T.; Been, Michael D.. A circular trans-acting hepatitis delta virus ribozyme. Nucleic Acids Res. (1993), 21(18), 4253-8.

[0245] TABLE II
A. 2.5 μmol Synthesis Cycle ABI 394 Instrument

| Reagent | Equivalents | Amount | Wait Time* DNA | Wait Time* 2′-O-methyl | Wait Time*RNA |
|---|---|---|---|---|---|
| Phosphoramidites | 6.5 | 163 μL | 45 sec | 2.5 min | 7.5 min |
| S-Ethyl Tetrazole | 23.8 | 238 μL | 45 sec | 2.5 min | 7.5 min |
| Acetic Anhydride | 100 | 233 μL | 5 sec | 5 sec | 5 sec |
| N-Methyl | 186 | 233 μL | 5 sec | 5 sec | 5 sec |
| Imidazole | | | | | |
| TCA | 176 | 2.3 mL | 21 sec | 21 sec | 21 sec |
| Iodine | 11.2 | 1.7 mL | 45 sec | 45 sec | 45 sec |
| Beaucage | 12.9 | 645 μL | 100 sec | 300 sec | 300 sec |
| Acetonitrile | NA | 6.67 mL | NA | NA | NA |

B. 0.2 μmol Synthesis Cycle ABI 394 Instrument

| | | | | | |
|---|---|---|---|---|---|
| Phosphoramidites | 15 | 31 μL | 45 sec | 233 sec | 465 sec |
| S-Ethyl Tetrazole | 38.7 | 31 μL | 45 sec | 233 min | 465 sec |
| Acetic Anhydride | 655 | 124 μL | 5 sec | 5 sec | 5 sec |
| N-Methyl | 1245 | 124 μL | 5 sec | 5 sec | 5 sec |
| Imidazole | | | | | |
| TCA | 700 | 732 μL | 10 sec | 10 sec | 10 sec |
| Iodine | 20.6 | 244 μL | 15 sec | 15 sec | 15 sec |
| Beaucage | 7.7 | 232 μL | 100 sec | 300 sec | 300 sec |
| Acetonitrile | NA | 2.64 mL | NA | NA | NA |

C. 0.2 μmol Synthesis Cycle 96 well Instrument

| | Equivalents:DNA/ | Amount: DNA/2′-O- | | Wait Time* 2′-O- | |
|---|---|---|---|---|---|
| Reagent | 2′-O-methyl/Ribo | methyl/Ribo | Wait Time* DNA | methyl | Wait Time* Ribo |
| Phosphoramidites | 22/33/66 | 40/60/120 μL | 60 sec | 180 sec | 360 sec |
| S-Ethyl Tetrazole | 70/105/210 | 40/60/120 μL | 60 sec | 180 min | 360 sec |
| Acetic Anhydride | 265/265/265 | 50/50/50 μL | 10 sec | 10 sec | 10 sec |
| N-Methyl | 502/502/502 | 50/50/50 μL | 10 sec | 10 sec | 10 sec |
| Imidazole | | | | | |
| TCA | 238/475/475 | 250/500/500 μL | 15 sec | 15 sec | 15 sec |
| Iodine | 6.8/6.8/6.8 | 80/80/80 μL | 30 sec | 30 sec | 30 sec |
| Beaucage | 34/51/51 | 80/120/120 | 100 sec | 200 sec | 200 sec |
| Acetonitrile | NA | 1150/1150/1150 μL | NA | NA | NA |

*Wait time does not include contact time during delivery.

[0246] TABLE III
HBV Strains and Accession numbers

| Accession Number | NAME |
|---|---|
| AF100308.1 | AF100308 Hepatitis B virus strain 2-18, complete |
| AB026815.1 | AB026815 Hepatitis B virus DNA, complete genome, |
| AH033559.1 | AB033559 Hepatitis B virus DNA, complete genome, |
| AB033558.1 | AB033558 Hepatitis B virus DNA, complete genome, |
| AB033557.1 | AB033557 Hepatitis B virus DNA, complete genome, |
| AB033556.1 | AB033556 Hepatitis B virus DNA, complete genome, |
| AB033555.1 | AB033555 Hepatitis B virus DNA, complete genome, |
| AB033554.1 | AB033554 Hepatitis B virus DNA, complete genome, |
| AB033553.1 | AB033553 Hepatitis B virus DNA, complete genome, |
| AB033552.1 | AB033552 Hepatitis B virus DNA, complete genome, |
| AB033551.1 | AB033551 Hepatitis B virus DNA, complete genome, |
| AB033550.1 | AB033550 Hepatitis B virus DNA, complete genome |
| AF143308.1 | AF143308 Hepatitis B virus clone WB1254, complete |
| AF1433O7.1 | AF143307 Hepatitis B virus clone RM518, complete |
| AF143306.1 | AF143306 Hepatitis B virus clone RMS17, complete |
| AF143305.1 | AF143305 Hepatitis B virus clone RM501, complete |
| AF143304.1 | AF143304 Hepatitis B virus clone HD319, complete |
| AF143303.1 | AF143303 Hepatitis B virus clone HD1406, complete |
| AF143302.1 | AF143302 Hepatitis B virus clone HD1402, complete |
| AF143301.1 | AF143301 Hepatitis B virus clone BW1903, complete |
| AF143300.1 | AF143300 Hepatitis B virus clone 7832-G4, complete |
| AF143299.1 | AF143299 Hepatitis B virus clone 7744-G9, complete |
| AF143298.1 | AF143298 Hepatitis B virus clone 7720-G8, complete |
| AB026814.1 | AB026814 Hepatitis B virus DNA, complete genome, |
| AB026813.1 | AB026813 Hepatitis B virus DNA, complete genome, |
| AB026812.1 | AB026812 Hepatitis B virus DNA, complete genome, |
| AB026811.1 | AB026811 Hepatitis B virus DNA, complete genome, |
| AJ131956.1 | HBV131956 Hepatitis B virus complete genome, |
| AF151735.1 | AF151735 Hepatitis B virus, complete genome |
| AF090842.1 | AF090842 Hepatitis B virus strain G5.27295, complete |
| AF090841.1 | AF090841 Hepatitis B virus strain G4.27241, complete |
| AF090840.1 | AF090840 Hepatitis B virus strain G3.27270, complete |
| AF090839.1 | AF090839 Hepatitis B virus strain G2.27246, complete |
| AF090838.1 | AF090838 Hepatitis B virus strain P1.27239, complete |
| Y18858.1 | HBV18858 Hepatitis B virus complete genome, isolate |
| Y18857.1 | HBV18857 Hepatitis B virus complete genome, isolate |
| D12980.1 | HPBCG Hepatitis B virus subtype adr (SRADR) DNA, |
| Y18856.1 | HBV18856 Hepatitis B virus complete genome, isolate |
| Y18855.1 | HBV18855 Hepatitis B virus complete genome, isolate |
| AJ131133.1 | HBV131133 Hepatitis H virus, complete genome, strain |
| X80925.1 | HBVP6PCXX Hepatitis B virus (patient 6) complete |
| X80926.1 | HBVP5PCXX Hepatitis B virus (patient 5) complete |
| X80924.1 | HBVP4PCXX Hepatitis B virus (patient 4) complete |
| AF100309.1 | Hepatitis B virus strain 56, complete genome |
| AF068756.1 | AF068756 Hepatitis B virus, complete genome |
| AF043593.1 | AF043593 Hepatitis B virus isolate 6/89, complete |
| Y07587.1 | HBVAYWGEN Hepatitis B virus, complete genome |
| D28880.1 | D28880 Hepatitis B virus DNA, complete genome, strain |
| X98076.1 | HBVDEFVP3 Hepatitis B virus complete genome with |
| X98075.1 | HBVDEFVP2 Hepatitis B virus complete genome with |
| X98074.1 | HBVDEFVP1 Hepatitis B virus complete genome with |
| X98077.1 | HBVCGWITY Hepatitis B virus complete genome, wild type |
| X98072.1 | HBVCGINSC Hepatitis B virus complete genome with |
| X98073.1 | HBVCGINCX Hepatitis B virus complete genome with |
| U95551.1 | U95551 Hepatitis B virus subtype ayw, complete genome |
| D23684.1 | HPBC6T588 Hepatitis B virus (C6-TKBS88) complete genome |
| D23683.1 | HPBC5HK02 Hepatitis B virus (C5-HBVK02) complete genome |
| D23682.1 | HPBB5HK01 Hepatitis B virus (BS-HBVK01) complete genome |
| D23681.1 | HPBC4HST2 Hepatitis B virus (C4-HBVST2) complete genome |
| D23680.1 | HPBB4HST1 Hepatitis B virus (B4-HBVST1) complete genome |
| D00331.1 | HPBADW3 Hepatitis B virus genome, complete genome |
| D00330.1 | HPBADW2 Hepatitis B virus genome, complete genome |
| D50489.1 | HPBA11A Hepatitis B virus DNA, complete genome |
| D23679.1 | HPBA3HMS2 Hepatitis B virus (A3-HBVMS2) complete genome |
| D23678.1 | HPBA2HYS2 Hepatitis B virus (A2-HBVYS2) complete genome |
| D23677.1 | HPBA1HKK2 Hepatitis B virus (A1-HBVKK2) complete genome |
| D16665.1 | HPBADRM Hepatitis B virus DNA, complete genome |
| D00329.1 | HPHADW1 Hepatitis B virus (HBV) genome, complete genome |
| X97851.1 | HBVP6CSX Hepatitis B virus (patient 6) complete genome |
| X97850.1 | HBVP4CSX Hepatitis B virus (patient 4) complete genome |
| X97849.1 | HBVP3CSX Hepatitis B virus (patient 3) complete genome |
| X97848.1 | HBVP2CSX Hepatitis B virus (patient 2) complete genome |
| X51970.1 | HVHEPB Hepatitis B virus (HBV 991) complete genome |
| M38636.1 | HPBCGADR Hepatitis B virus, subtype adr, complete genome |
| X59795.1 | HBVAYWMCG Hepatitis B virus (ayw subtype mutant) |
| M38454.1 | HPBADR1CG Hepatitis B virus, complete genome |
| M32138.1 | HPBHBVAA Hepatitis B virus variant HBV-alpha1, complete |
| J02203.1 | HPBAYW Human hepatitis B virus (subtype ayw), complete |
| M12906.1 | HPBADRA Hepatitis B virus subtype adr, complete genome |
| M54923.1 | HPBADWZ Hepatitis B virus (subtype adw), complete genome |
| L27106.1 | HPBMUT Hepatitis B virus mutant complete genome |

[0247] TABLE IV
HBV Substrate Sequence

| NT Position* | Substrate | Seq ID |
|---|---|---|
| 82 | CUAUCGUCCCCUUCUUCAUC | 1 |
| 101 | CUACCGUUCCGGCC | 2 |
| 159 | CUUCUCAUCU | 3 |
| 184 | CUUCCCUUCACCAC | 4 |
| 269 | GACUCUCAGAAUGUCAACGAC | 5 |
| 381 | CUGUAGGCAUAAAUGGUCUG | 6 |
| 401 | GUUCACCAGCACCAUGCAACUUUUU | 7 |
| 424 | UUUCACGUCUGCCUAAUCAUC | 8 |
| 524 | AUUUGGAGCUUC | 9 |
| 562 | CUGACUUCUUUCCUUCUAUUC | 10 |
| 649 | CUCACCAUACCGCACUCA | 11 |
| 667 | GGCAAGCUAUUCUGUG | 12 |
| 717 | GGAAGUAAUUUGGAAGAC | 13 |
| 758 | CAGCUAUGUCAAUGUUAA | 14 |
| 783 | CUAAAAUCGGCCUAAAAUCAGAC | 15 |
| 812 | CAUUUCCUGUCUCACUUUUGGAAGAG | 16 |
| 887 | UCCUGCUUACAGAC | 17 |
| 922 | CAACACUUCCGGAAACUACUGUUGUUAG | 18 |
| 989 | CUCGCCUCGCAGACGAAGGUCUC | 19 |
| 1009 | CAAUCGCCGCGUCGCAGAAG | 20 |
| 1031 | AUCUCAAUCUCGGGAAUCUCAA | 21 |
| 1052 | AUGUUAGUAUCCCUUGGACUC | 22 |
| 1072 | CAUAAGGUGGGAAACUUUACUG | 23 |
| 1109 | CUGUACCUAUUCUUUAAAUCC | 24 |
| 1127 | CUGAGUGGCAAACUCCC | 25 |
| 1271 | CCAAAUAUCUGCCCUUGGACAA | 26 |
| 1297 | AUUAAACCAUAUUAUCCUGAACA | 27 |
| 1319 | AUGCAGUUAAUCAUUACUUCAAAACUA | 28 |
| 1340 | AAACUAGGCAUUA | 29 |
| 1370 | AGGCCCGCAUUCUAUAUAAGAGAG | 30 |
| 1393 | GAAACUACGCGCAGCGCCUCAUUUUGU | 31 |
| 1412 | CAUUUUGUGGGUCACCAUA | 32 |
| 1441 | CAAGAGCUACAGCAUGGG | 33 |

LOCUS HPBADR1CG 3221 bp DNA circular VRL 06 MAR. 1995
DEFINITION Hepatitis B virus, complete genome.
ACCESSION M38454
*The nucleotide number referred to in that table is the position of the 5′ end of the oligo in this sequence.

[0248] TABLE V
HUMAN HBV HAMMERHEAD ENZYMATIC NUCLEIC ACID AND TARGET SEQUENCE

| Pos | Substrate | Seq ID | Enzymatic nucleic acid | Rz Seq ID |
|---|---|---|---|---|
| 13 | CCACCACU U UCCACCAA | 34 | UUGGUGGA CUGAUGAG GCCGUUAGGC CGAA AGUGGUGG | 2543 |
| 14 | CACCACUU U CCACCAAA | 35 | UUUGGUGG CUGAUGAG GCCGUUAGGC CGAA AAGUGGUG | 2544 |
| 15 | ACCACUUU C CACCAAAC | 36 | GUUUGGUG CUGAUGAG GCCGUUAGGC CGAA AAAGUGGU | 2545 |
| 25 | ACCAAACU C UUCAAGAU | 37 | AUCUUGAA CUGAUGAG GCCGUUAGGC CGAA AGUUUGGU | 2546 |
| 27 | CAAACUCU U CAAGAUCC | 38 | GGAUCUUG CUGAUGAG GCCGUUAGGC CGAA AGAGUUUG | 2547 |
| 28 | AAACUCUU C AAGAUCCC | 39 | GGGAUCUU CUGAUGAG GCCGUUAGGC CGAA AAGAGUUU | 2548 |
| 34 | UUCAAGAU C CCAGAGUC | 40 | GACUCUGG CUGAUGAG GCCGUUAGGC CGAA AUCUUGAA | 2549 |
| 42 | CCCAGAGU C AGGGCCCU | 41 | AGGGCCCU CUGAUGAG GCCGUUAGGC CGAA ACUCUGGG | 2550 |
| 53 | GGCCCUGU A CUUUCCUG | 42 | CAGGAAAG CUGAUGAG GCCGUUAGGC CGAA ACAGGGCC | 2551 |
| 56 | CCUGUACU U UCCUGCUG | 43 | CAGCAGGA CUGAUGAG GCCGUUAGGC CGAA AGUACAGG | 2552 |
| 57 | CUGUACUU U CCUGCUGG | 44 | CCAGCAGG CUGAUGAG GCCGUUAGGC CGAA AAGUACAG | 2553 |
| 58 | UGUACUUU C CUGCUGGU | 45 | ACCAGCAG CUGAUGAG GCCGUUAGGC CGAA AAAGUACA | 2554 |
| 71 | UGGUGGCU C CAGUUCAG | 46 | CUGAACUG CUGAUGAG GCCGUUAGGC CGAA AGCCACCA | 2555 |
| 76 | GCUCCAGU U CAGGAACA | 47 | UGUUCCUG CUGAUGAG GCCGUUAGGC CGAA ACUGGAGC | 2556 |
| 77 | CUCCAGUU C AGGAACAG | 48 | CUGUUCCU CUGAUGAG GCCGUUAGGC CGAA AACUGGAG | 2557 |
| 97 | GCCCUGCU C AGAAUACU | 49 | AGUAUUCU CUGAUGAG GCCGUUAGGC CGAA AGCAGGGC | 2558 |
| 103 | CUCAGAAU A CUGUCUCU | 50 | AGAGACAG CUGAUGAG GCCGUUAGGC CGAA AUUCUGAG | 2559 |
| 108 | AAUACUGU C UCUGCCAU | 51 | AUGGCAGA CUGAUGAG GCCGUUAGGC CGAA ACAGUAUU | 2560 |
| 110 | UACUGUCU C UGCCAUAU | 52 | AUAUGGCA CUGAUGAG GCCGUUAGGC CGAA AGACAGUA | 2561 |
| 117 | UCUGCCAU A UCGUCAAU | 53 | AUUGACGA CUGAUGAG GCCGUUAGGC CGAA AUGGCAGA | 2562 |
| 119 | UGCCAUAU C GUCAAUCU | 54 | AGAUUGAC CUGAUGAG GCCGUUAGGC CGAA AUAUGGCA | 2563 |
| 122 | CAUAUCGU C AAUCUUAU | 55 | AUAAGAUU CUGAUGAG GCCGUUAGGC CGAA ACGAUAUG | 2564 |
| 126 | UCGUCAAU C UUAUCGAA | 56 | UUCGAUAA CUGAUGAG GCCGUUAGGC CGAA AUUGACGA | 2565 |
| 128 | GUCAAUCU U AUCGAAGA | 57 | UCUUCGAU CUGAUGAG GCCGUUAGGC CGAA AGAUUGAC | 2566 |
| 129 | UCAAUCUU A UCGAAGAC | 58 | GUCUUCGA CUGAUGAG GCCGUUAGGC CGAA AAGAUUGA | 2567 |
| 131 | AAUCUUAU C GAAGACUG | 59 | CAGUCUUC CUGAUGAG GCCGUUAGGC CGAA AUAAGAUU | 2568 |
| 150 | GACCCUGU A CCGAACAU | 60 | AUGUUCGG CUGAUGAG GCCGUUAGGC CGAA ACAGGGUC | 2569 |
| 168 | GAGAACAU C GCAUCAGG | 61 | CCUGAUGC CUGAUGAG GCCGUUAGGC CGAA AUGUUCUC | 2570 |
| 173 | CAUCGCAU C AGGACUCC | 62 | GGAGUCCU CUGAUGAG GCCGUUAGGC CGAA AUGCGAUG | 2571 |
| 180 | UCAGGACU C CUAGGACC | 63 | GGUCCUAG CUGAUGAG GCCGUUAGGC CGAA AGUCCUGA | 2572 |
| 183 | GGACUCCU A GGACCCCU | 64 | AGGGGUCC CUGAUGAG GCCGUUAGGC CGAA AGGAGUCC | 2573 |
| 195 | CCCCUGCU C GUGUUACA | 65 | UGUAACAC CUGAUGAG GCCGUUAGGC CGAA AGCAGGGG | 2574 |
| 200 | GCUCGUGU U ACAGGCGG | 66 | CCGCCUGU CUGAUGAG GCCGUUAGGC CGAA ACACGAGC | 2575 |
| 201 | CUCGUGUU A CAGGCGGG | 67 | CCCGCCUG CUGAUGAG GCCGUUAGGC CGAA AACACGAG | 2576 |
| 212 | GGCGGGGU U UUUCUUGU | 68 | ACAAGAAA CUGAUGAG GCCGUUAGGC CGAA ACCCCGCC | 2577 |
| 213 | GCGGGGUU U UUCUUGUU | 69 | AACAAGAA CUGAUGAG GCCGUUAGGC CGAA AACCCCGC | 2578 |
| 214 | CGGGGUUU U UCUUGUUG | 70 | CAACAAGA CUGAUGAG GCCGUUAGGC CGAA AAACCCCG | 2579 |
| 215 | GGGGUUUU U CUUGUUGA | 71 | UCAACAAG CUGAUGAG GCCGUUAGGC CGAA AAAACCCC | 2580 |
| 216 | GGGUUUUU C UUGUUGAC | 72 | GUCAACAA CUGAUGAG GCCGUUAGGC CGAA AAAAACCC | 2581 |
| 218 | GUUUUUCU U GUUGACAA | 73 | UUGUCAAC CUGAUGAG GCCGUUAGGC CGAA AGAAAAAC | 2582 |
| 221 | UUUCUUGU U GACAAAAA | 74 | UUUUUGUC CUGAUGAG GCCGUUAGGC CGAA ACAAGAAA | 2583 |
| 231 | ACAAAAAU C CUCACAAU | 75 | AUUGUGAG CUGAUGAG GCCGUUAGGC CGAA AUUUUUGU | 2584 |
| 234 | AAAAUCCU C ACAAUACC | 76 | GGUAUUGU CUGAUGAG GCCGUUAGGC CGAA AGGAUUUU | 2585 |
| 240 | CUCACAAU A CCACAGAG | 77 | CUCUGUGG CUGAUGAG GCCGUUAGGC CGAA AUUGUGAG | 2586 |
| 250 | CACAGAGU C UAGACUCG | 78 | CGAGUCUA CUGAUGAG GCCGUUAGGC CGAA ACUCUGUG | 2587 |
| 252 | CAGAGUCU A GACUCGUG | 79 | CACGAGUC CUGAUGAG GCCGUUAGGC CGAA AGACUCUG | 2588 |
| 257 | UCUAGACU C GUGGUGGA | 80 | UCCACCAC CUGAUGAG GCCGUUAGGC CGAA AGUCUAGA | 2589 |
| 268 | GGUGGACU U CUCUCAAU | 81 | AUUGAGAG CUGAUGAG GCCGUUAGGC CGAA AGUCCACC | 2590 |
| 269 | GUGGACUU C UCUCAAUU | 82 | AAUUGAGA CUGAUGAG GCCGUUAGGC CGAA AAGUCCAC | 2591 |
| 271 | GGACUUCU C UCAAUUUU | 83 | AAAAUUGA CUGAUGAG GCCGUUAGGC CGAA AGAAGUCC | 2592 |
| 273 | ACUUCUCU C AAUUUUCU | 84 | AGAAAAUU CUGAUGAG GCCGUUAGGC CGAA AGAGAAGU | 2593 |
| 277 | CUCUCAAU U UUCUAGGG | 85 | CCCUAGAA CUGAUGAG GCCGUUAGGC CGAA AUUGAGAG | 2594 |
| 278 | UCUCAAUU U UCUAGGGG | 86 | CCCCUAGA CUGAUGAG GCCGUUAGGC CGAA AAUUGAGA | 2595 |
| 279 | CUCAAUUU U CUAGGGGG | 87 | CCCCCUAG CUGAUGAG GCCGUUAGGC CGAA AAAUUGAG | 2596 |
| 280 | UCAAUUUU C UAGGGGGA | 88 | UCCCCCUA CUGAUGAG GCCGUUAGGC CGAA AAAAUUGA | 2597 |
| 282 | AAUUUUCU A GGGGGAAC | 89 | GUUCCCCC CUGAUGAG GCCGUUAGGC CGAA AGAAAAUU | 2598 |
| 301 | CCGUGUGU C UUGGCCAA | 90 | UUGGCCAA CUGAUGAG GCCGUUAGGC CGAA ACACACGG | 2599 |
| 303 | GUGUGUCU U GGCCAAAA | 91 | UUUUGGCC CUGAUGAG GCCGUUAGGC CGAA AGACACAC | 2600 |
| 313 | GCCAAAAU U CGCAGUCC | 92 | GGACUGCG CUGAUGAG GCCGUUAGGC CGAA AUUUUGGC | 2601 |
| 314 | CCAAAAUU C GCAGUCCC | 93 | GGGACUGC CUGAUGAG GCCGUUAGGC CGAA AAUUUUGG | 2602 |
| 320 | UUCGCAGU C CCAAAUCU | 94 | AGAUUUGG CUGAUGAG GCCGUUAGGC CGAA ACUGCGAA | 2603 |
| 327 | UCCCAAAU C UCCAGUCA | 95 | UGACUGGA CUGAUGAG GCCGUUAGGC CGAA AUUUGGGA | 2604 |
| 329 | CCAAAUCU C CAGUCACU | 96 | AGUGACUG CUGAUGAG GCCGUUAGGC CGAA AGAUUUGG | 2605 |
| 334 | UCUCCAGU C ACUCACCA | 97 | UGGUGAGU CUGAUGAG GCCGUUAGGC CGAA ACUGGAGA | 2606 |
| 338 | CAGUCACU C ACCAACCU | 98 | AGGUUGGU CUGAUGAG GCCGUUAGGC CGAA AGUGACUG | 2607 |
| 349 | CAACCUGU U GUCCUCCA | 99 | UGGAGGAC CUGAUGAG GCCGUUAGGC CGAA ACAGGUUG | 2608 |
| 352 | CCUGUUGU C CUCCAAUU | 100 | AAUUGGAG CUGAUGAG GCCGUUAGGC CGAA ACAACAGG | 2609 |
| 355 | GUUGUCCU C CAAUUUGU | 101 | ACAAAUUG CUGAUGAG GCCGUUAGGC CGAA AGGACAAC | 2610 |
| 360 | CCUCCAAU U UGUCCUGG | 102 | CCAGGACA CUGAUGAG GCCGUUAGGC CGAA AUUGGAGG | 2611 |
| 361 | CUCCAAUU U GUCCUGGU | 103 | ACCAGGAC CUGAUGAG GCCGUUAGGC CGAA AAUUGGAG | 2612 |
| 364 | CAAUUUGU C CUGGUUAU | 104 | AUAACCAG CUGAUGAG GCCGUUAGGC CGAA ACAAAUUG | 2613 |
| 370 | GUCCUGGU U AUCGCUGG | 105 | CCAGCGAU CUGAUGAG GCCGUUAGGC CGAA ACCAGGAC | 2614 |
| 371 | UCCUGGUU A UCGCUGGA | 106 | UCCAGCGA CUGAUGAG GCCGUUAGGC CGAA AACCAGGA | 2615 |
| 373 | CUGGUUAU C GCUGGAUG | 107 | CAUCCAGC CUGAUGAG GCCGUUAGGC CGAA AUAACCAG | 2616 |
| 385 | GGAUGUGU C UGCGGCGU | 108 | ACGCCGCA CUGAUGAG GCCGUUAGGC CGAA ACACAUCC | 2617 |
| 394 | UGCGGCGU U UUAUCAUC | 109 | GAUGAUAA CUGAUGAG GCCGUUAGGC CGAA ACGCCGCA | 2618 |
| 395 | GCGGCGUU U UAUCAUCU | 110 | AGAUGAUA CUGAUGAG GCCGUUAGGC CGAA AACGCCGC | 2619 |
| 396 | CGGCGUUU U AUCAUCUU | 111 | AAGAUGAU CUGAUGAG GCCGUUAGGC CGAA AAACGCCG | 2620 |
| 397 | GGCGUUUU A UCAUCUUC | 112 | GAAGAUGA CUGAUGAG GCCGUUAGGC CGAA AAAACGCC | 2621 |
| 399 | CGUUUUAU C AUCUUCCU | 113 | AGGAAGAU CUGAUGAG GCCGUUAGGC CGAA AUAAAACG | 2622 |
| 402 | UUUAUCAU C UUCCUCUG | 114 | CAGAGGAA CUGAUGAG GCCGUUAGGC CGAA AUGAUAAA | 2623 |
| 404 | UAUCAUCU U CCUCUGCA | 115 | UGCAGAGG CUGAUGAG GCCGUUAGGC CGAA AGAUGAUA | 2624 |
| 405 | AUCAUCUU C CUCUGCAU | 116 | AUGCAGAG CUGAUGAG GCCGUUAGGC CGAA AAGAUGAU | 2625 |
| 408 | AUCUUCCU C UGCAUCCU | 117 | AGGAUGCA CUGAUGAG GCCGUUAGGC CGAA AGGAAGAU | 2626 |
| 414 | CUCUGCAU C CUGCUGCU | 118 | AGCAGCAG CUGAUGAG GCCGUUAGGC CGAA AUGCAGAG | 2627 |
| 423 | CUGCUGCU A UGCCUCAU | 119 | AUGAGGCA CUGAUGAG GCCGUUAGGC CGAA AGCAGCAG | 2628 |
| 429 | CUAUGCCU C AUCUUCUU | 120 | AAGAAGAU CUGAUGAG GCCGUUAGGC CGAA AGGCAUAG | 2629 |
| 432 | UGCCUCAU C UUCUUGUU | 121 | AACAAGAA CUGAUGAG GCCGUUAGGC CGAA AUGAGGCA | 2630 |
| 434 | CCUCAUCU U CUUGUUGG | 122 | CCAACAAG CUGAUGAG GCCGUUAGGC CGAA AGAUGAGG | 2631 |
| 435 | CUCAUCUU C UUGUUGGU | 123 | ACCAACAA CUGAUGAG GCCGUUAGGC CGAA AAGAUGAG | 2632 |
| 437 | CAUCUUCU U GUUGGUUC | 124 | GAACCAAC CUGAUGAG GCCGUUAGGC CGAA AGAAGAUG | 2633 |
| 440 | CUUCUUGU U GGUUCUUC | 125 | GAAGAACC CUGAUGAG GCCGUUAGGC CGAA ACAAGAAG | 2634 |
| 444 | UUGUUGGU U CUUCUGGA | 126 | UCCAGAAG CUGAUGAG GCCGUUAGGC CGAA ACCAACAA | 2635 |
| 445 | UGUUGGUU C UUCUGGAC | 127 | GUCCAGAA CUGAUGAG GCCGUUAGGC CGAA AACCAACA | 2636 |
| 447 | UUGGUUCU U CUGGACUA | 128 | UAGUCCAG CUGAUGAG GCCGUUAGGC CGAA AGAACCAA | 2637 |
| 448 | UGGUUCUU C UGGACUAU | 129 | AUAGUCCA CUGAUGAG GCCGUUAGGC CGAA AAGAACCA | 2638 |
| 455 | UCUGGACU A UCAAGGUA | 130 | UACCUUGA CUGAUGAG GCCGUUAGGC CGAA AGUCCAGA | 2639 |
| 457 | UGGACUAU C AAGGUAUG | 131 | CAUACCUU CUGAUGAG GCCGUUAGGC CGAA AUAGUCCA | 2640 |
| 463 | AUCAAGGU A UGUUGCCC | 132 | GGGCAACA CUGAUGAG GCCGUUAGGC CGAA ACCUUGAU | 2641 |
| 467 | AGGUAUGU U GCCCGUUU | 133 | AAACGGGC CUGAUGAG GCCGUUAGGC CGAA ACAUACCU | 2642 |
| 474 | UUGCCCGU U UGUCCUCU | 134 | AGAGGACA CUGAUGAG GCCGUUAGGC CGAA ACGGGCAA | 2643 |
| 475 | UGCCCGUU U GUCCUCUA | 135 | UAGAGGAC CUGAUGAG GCCGUUAGGC CGAA AACGGGCA | 2644 |
| 478 | CCGUUUGU C CUCUAAUU | 136 | AAUUAGAG CUGAUGAG GCCGUUAGGC CGAA ACAAACGG | 2645 |
| 481 | UUUGUCCU C UAAUUCCA | 137 | UGGAAUUA CUGAUGAG GCCGUUAGGC CGAA AGGACAAA | 2646 |
| 483 | UGUCCUCU A AUUCCAGG | 138 | CCUGGAAU CUGAUGAG GCCGUUAGGC CGAA AGAGGACA | 2647 |
| 486 | CCUCUAAU U CCAGGAUC | 139 | GAUCCUGG CUGAUGAG GCCGUUAGGC CGAA AUUAGAGG | 2648 |
| 487 | CUCUAAUU C CAGGAUCA | 140 | UGAUCCUG CUGAUGAG GCCGUUAGGC CGAA AAUUAGAG | 2649 |
| 494 | UCCAGGAU C AUCAACAA | 141 | UUGUUGAU CUGAUGAG GCCGUUAGGC CGAA AUCCUGGA | 2650 |
| 497 | AGGAUCAU C AACAACCA | 142 | UGGUUGUU CUGAUGAG GCCGUUAGGC CGAA AUGAUCCU | 2651 |
| 535 | GCACAACU C CUGCUCAA | 143 | UUGAGCAG CUGAUGAG GCCGUUAGGC CGAA AGUUGUGC | 2652 |
| 541 | CUCCUGCU C AAGGAACC | 144 | GGUUCCUU CUGAUGAG GCCGUUAGGC CGAA AGCAGGAG | 2653 |
| 551 | AGGAACCU C UAUGUUUC | 145 | GAAACAUA CUGAUGAG GCCGUUAGGC CGAA AGGUUCCU | 2654 |
| 553 | GAACCUCU A UGUUUCCC | 146 | GGGAAACA CUGAUGAG GCCGUUAGGC CGAA AGAGGUUC | 2655 |
| 557 | CUCUAUGU U UCCCUCAU | 147 | AUGAGGGA CUGAUGAG GCCGUUAGGC CGAA ACAUAGAG | 2656 |
| 558 | UCUAUGUU U CCCUCAUG | 148 | CAUGAGGG CUGAUGAG GCCGUUAGGC CGAA AACAUAGA | 2657 |
| 559 | CUAUGUUU C CCUCAUGU | 149 | ACAUGAGG CUGAUGAG GCCGUUAGGC CGAA AAACAUAG | 2658 |
| 563 | GUUUCCCU C AUGUUGCU | 150 | AGCAACAU CUGAUGAG GCCGUUAGGC CGAA AGGGAAAC | 2659 |
| 568 | CCUCAUGU U GCUGUACA | 151 | UGUACAGC CUGAUGAG GCCGUUAGGC CGAA ACAUGAGG | 2660 |
| 574 | GUUGCUGU A CAAAACCU | 152 | AGGUUUUG CUGAUGAG GCCGUUAGGC CGAA ACAGCAAC | 2661 |
| 583 | CAAAACCU A CGGACGGA | 153 | UCCGUCCG CUGAUGAG GCCGUUAGGC CGAA AGGUUUUG | 2662 |
| 604 | GCACCUGU A UUCCCAUC | 154 | GAUGGGAA CUGAUGAG GCCGUUAGGC CGAA ACAGGUGC | 2663 |
| 606 | ACCUGUAU U CCCAUCCC | 155 | GGGAUGGG CUGAUGAG GCCGUUAGGC CGAA AUACAGGU | 2664 |
| 607 | CCUGUAUU C CCAUCCCA | 156 | UGGGAUGG CUGAUGAG GCCGUUAGGC CGAA AAUACAGG | 2665 |
| 612 | AUUCCCAU C CCAUCAUC | 157 | GAUGAUGG CUGAUGAG GCCGUUAGGC CGAA AUGGGAAU | 2666 |
| 617 | CAUCCCAU C AUCUUGGG | 158 | CCCAAGAU CUGAUGAG GCCGUUAGGC CGAA AUGGGAUG | 2667 |
| 620 | CCCAUCAU C UUGGGCUU | 159 | AAGCCCAA CUGAUGAG GCCGUUAGGC CGAA AUGAUGGG | 2668 |
| 622 | CAUCAUCU U GGGCUUUC | 160 | GAAAGCCC CUGAUGAG GCCGUUAGGC CGAA AGAUGAUG | 2669 |
| 628 | CUUGGGCU U UCGCAAAA | 161 | UUUUGCGA CUGAUGAG GCCGUUAGGC CGAA AGCCCAAG | 2670 |
| 629 | UUGGGCUU U CGCAAAAU | 162 | AUUUUGCG CUGAUGAG GCCGUUAGGC CGAA AAGCCCAA | 2671 |
| 630 | UGGGCUUU C GCAAAAUA | 163 | UAUUUUGC CUGAUGAG GCCGUUAGGC CGAA AAAGCCCA | 2672 |
| 638 | CGCAAAAU A CCUAUGGG | 164 | CCCAUAGG CUGAUGAG GCCGUUAGGC CGAA AUUUUGCG | 2673 |
| 642 | AAAUACCU A UGGGAGUG | 165 | CACUCCCA CUGAUGAG GCCGUUAGGC CGAA AGGUAUUU | 2674 |
| 656 | GUGGGCCU C AGUCCGUU | 166 | AACGGACU CUGAUGAG GCCGUUAGGC CGAA AGGCCCAC | 2675 |
| 660 | GCCUCAGU C CGUUUCUC | 167 | GAGAAACG CUGAUGAG GCCGUUAGGC CGAA ACUGAGGC | 2676 |
| 664 | CAGUCCGU U UCUCUUGG | 168 | CCAAGAGA CUGAUGAG GCCGUUAGGC CGAA ACGGACUG | 2677 |
| 665 | AGUCCGUU U CUCUUGGC | 169 | GCCAAGAG CUGAUGAG GCCGUUAGGC CGAA AACGGACU | 2678 |
| 666 | GUCCGUUU C UCUUGGCU | 170 | AGCCAAGA CUGAUGAG GCCGUUAGGC CGAA AAACGGAC | 2679 |
| 668 | CCGUUUCU C UUGGCUCA | 171 | UGAGCCAA CUGAUGAG GCCGUUAGGC CGAA AGAAACGG | 2680 |
| 670 | GUUUCUCU U GGCUCAGU | 172 | ACUGAGCC CUGAUGAG GCCGUUAGGC CGAA AGAGAAAC | 2681 |
| 675 | UCUUGGCU C AGUUUACU | 173 | AGUAAACU CUGAUGAG GCCGUUAGGC CGAA AGCCAAGA | 2682 |
| 679 | GGCUCAGU U UACUAGUG | 174 | CACUAGUA CUGAUGAG GCCGUUAGGC CGAA ACUGAGCC | 2683 |
| 680 | GCUCAGUU U ACUAGUGC | 175 | GCACUAGU CUGAUGAG GCCGUUAGGC CGAA AACUGAGC | 2684 |
| 681 | CUCAGUUU A CUAGUGCC | 176 | GGCACUAG CUGAUGAG GCCGUUAGGC CGAA AAACUGAG | 2685 |
| 684 | AGUUUACU A GUGCCAUU | 177 | AAUGGCAC CUGAUGAG GCCGUUAGGC CGAA AGUAAACU | 2686 |
| 692 | AGUGCCAU U UGUUCAGU | 178 | ACUGAACA CUGAUGAG GCCGUUAGGC CGAA AUGGCACU | 2687 |
| 693 | GUGCCAUU U GUUCAGUG | 179 | CACUGAAC CUGAUGAG GCCGUUAGGC CGAA AAUGGCAC | 2688 |
| 696 | CCAUUUGU U CAGUGGUU | 180 | AACCACUG CUGAUGAG GCCGUUAGGC CGAA ACAAAUGG | 2689 |
| 697 | CAUUUGUU C AGUGGUUC | 181 | GAACCACU CUGAUGAG GCCGUUAGGC CGAA AACAAAUG | 2690 |
| 704 | UCAGUGGU U CGUAGGGC | 182 | GCCCUACG CUGAUGAG GCCGUUAGGC CGAA ACCACUGA | 2691 |
| 705 | CAGUGGUU C GUAGGGCU | 183 | AGCCCUAC CUGAUGAG GCCGUUAGGC CGAA AACCACUG | 2692 |
| 708 | UGGUUCGU A GGGCUUUC | 184 | GAAAGCCC CUGAUGAG GCCGUUAGGC CGAA ACGAACCA | 2693 |
| 714 | GUAGGGCU U UCCCCCAC | 185 | GUGGGGGA CUGAUGAG GCCGUUAGGC CGAA AGCCCUAC | 2694 |
| 715 | UAGGGCUU U CCCCCACU | 186 | AGUGGGGG CUGAUGAG GCCGUUAGGC CGAA AAGCCCUA | 2695 |
| 716 | AGGGCUUU C CCCCACUG | 187 | CAGUGGGG CUGAUGAG GCCGUUAGGC CGAA AAAGCCCU | 2696 |
| 726 | CCCACUGU C UGGCUUUC | 188 | GAAAGCCA CUGAUGAG GCCGUUAGGC CGAA ACAGUGGG | 2697 |
| 732 | GUCUGGCU U UCAGUUAU | 189 | AUAACUGA CUGAUGAG GCCGUUAGGC CGAA AGCCAGAC | 2698 |
| 733 | UCUGGCUU U CAGUUAUA | 190 | UAUAACUG CUGAUGAG GCCGUUAGGC CGAA AAGCCAGA | 2699 |
| 734 | CUGGCUUU C AGUUAUAU | 191 | AUAUAACU CUGAUGAG GCCGUUAGGC CGAA AAAGCCAG | 2700 |
| 738 | CUUUCAGU U AUAUGGAU | 192 | AUCCAUAU CUGAUGAG GCCGUUAGGC CGAA ACUGAAAG | 2701 |
| 739 | UUUCAGUU A UAUGGAUG | 193 | CAUCCAUA CUGAUGAG GCCGUUAGGC CGAA AACUGAAA | 2702 |
| 741 | UCAGUUAU A UGGAUGAU | 194 | AUCAUCCA CUGAUGAG GCCGUUAGGC CGAA AUAACUGA | 2703 |
| 755 | GAUGUGGU U UUGGGGGC | 195 | GCCCCCAA CUGAUGAG GCCGUUAGGC CGAA ACCACAUC | 2704 |
| 756 | AUGUGGUU U UGGGGGCC | 196 | GGCCCCCA CUGAUGAG GCCGUUAGGC CGAA AACCACAU | 2705 |
| 757 | UGUGGUUU U GGGGGCCA | 197 | UGGCCCCC CUGAUGAG GCCGUUAGGC CGAA AAACCACA | 2706 |
| 769 | GGCCAAGU C UGUACAAC | 198 | GUUGUACA CUGAUGAG GCCGUUAGGC CGAA ACUUGGCC | 2707 |
| 773 | AAGUCUGU A CAACAUCU | 199 | AGAUGUUG CUGAUGAG GCCGUUAGGC CGAA ACAGACUU | 2708 |
| 780 | UACAACAU C UUGAGUCC | 200 | GGACUCAA CUGAUGAG GCCGUUAGGC CGAA AUGUUGUA | 2709 |
| 782 | CAACAUCU U GAGUCCCU | 201 | AGGGACUC CUGAUGAG GCCGUUAGGC CGAA AGAUGUUG | 2710 |
| 787 | UCUUGAGU C CCUUUAUG | 202 | CAUAAAGG CUGAUGAG GCCGUUAGGC CGAA ACUCAAGA | 2711 |
| 791 | GAGUCCCU U UAUGCCGC | 203 | GCGGCAUA CUGAUGAG GCCGUUAGGC CGAA AGGGACUC | 2712 |
| 792 | AGUCCCUU U AUGCCGCU | 204 | AGCGGCAU CUGAUGAG GCCGUUAGGC CGAA AAGGGACU | 2713 |
| 793 | GUCCCUUU A UGCCGCUG | 205 | CAGCGGCA CUGAUGAG GCCGUUAGGC CGAA AAAGGGAC | 2714 |
| 803 | GCCGCUGU U ACCAAUUU | 206 | AAAUUGGU CUGAUGAG GCCGUUAGGC CGAA ACAGCGGC | 2715 |
| 804 | CCGCUGUU A CCAAUUUU | 207 | AAAAUUGG CUGAUGAG GCCGUUAGGC CGAA AACAGCGG | 2716 |
| 810 | UUACCAAU U UUCUUUUG | 208 | CAAAAGAA CUGAUGAG GCCGUUAGGC CGAA AUUGGUAA | 2717 |
| 811 | UACCAAUU U UCUUUUGU | 209 | ACAAAAGA CUGAUGAG GCCGUUAGGC CGAA AAUUGGUA | 2718 |
| 812 | ACCAAUUU U CUUUUGUC | 210 | GACAAAAG CUGAUGAG GCCGUUAGGC CGAA AAAUUGGU | 2719 |
| 813 | CCAAUUUU C UUUUGUCU | 211 | AGACAAAA CUGAUGAG GCCGUUAGGC CGAA AAAAUUGG | 2720 |
| 815 | AAUUUUCU U UUGUCUUU | 212 | AAAGACAA CUGAUGAG GCCGUUAGGC CGAA AGAAAAUU | 2721 |
| 816 | AUUUUCUU U UGUCUUUG | 213 | CAAAGACA CUGAUGAG GCCGUUAGGC CGAA AAGAAAAU | 2722 |
| 817 | UUUUCUUU U GUCUUUGG | 214 | CCAAAGAC CUGAUGAG GCCGUUAGGC CGAA AAAGAAAA | 2723 |
| 820 | UCUUUUGU C UUUGGGUA | 215 | UACCCAAA CUGAUGAG GCCGUUAGGC CGAA ACAAAAGA | 2724 |
| 822 | UUUUGUCU U UGGGUAUA | 216 | UAUACCCA CUGAUGAG GCCGUUAGGC CGAA AGACAAAA | 2725 |
| 823 | UUUGUCUU U GGGUAUAC | 217 | GUAUACCC CUGAUGAG GCCGUUAGGC CGAA AAGACAAA | 2726 |
| 828 | CUUUGGGU A UACAUUUA | 218 | UAAAUGUA CUGAUGAG GCCGUUAGGC CGAA ACCCAAAG | 2727 |
| 830 | UUGGGUAU A CAUUUAAA | 219 | UUUAAAUG CUGAUGAG GCCGUUAGGC CGAA AUACCCAA | 2728 |
| 834 | GUAUACAU U UAAACCCU | 220 | AGGGUUUA CUGAUGAG GCCGUUAGGC CGAA AUGUAUAC | 2729 |
| 835 | UAUACAUU U AAACCCUC | 221 | GAGGGUUU CUGAUGAG GCCGUUAGGC CGAA AAUGUAUA | 2730 |
| 836 | AUACAUUU A AACCCUCA | 222 | UGAGGGUU CUGAUGAG GCCGUUAGGC CGAA AAAUGUAU | 2731 |
| 843 | UAAACCCU C ACAAAACA | 223 | UGUUUUGU CUGAUGAG GCCGUUAGGC CGAA AGGGUUUA | 2732 |
| 865 | AUGGGGAU A UUCCCUUA | 224 | UAAGGGAA CUGAUGAG GCCGUUAGGC CGAA AUCCCCAU | 2733 |
| 867 | GGGGAUAU U CCCUUAAC | 225 | GUUAAGGG CUGAUGAG GCCGUUAGGC CGAA AUAUCCCC | 2734 |
| 868 | GGGAUAUU C CCUUAACU | 226 | AGUUAAGG CUGAUGAG GCCGUUAGGC CGAA AAUAUCCC | 2735 |
| 872 | UAUUCCCU U AACUUCAU | 227 | AUGAAGUU CUGAUGAG GCCGUUAGGC CGAA AGGGAAUA | 2736 |
| 873 | AUUCCCUU A ACUUCAUG | 228 | CAUGAAGU CUGAUGAG GCCGUUAGGC CGAA AAGGGAAU | 2737 |
| 877 | CCUUAACU U CAUGGGAU | 229 | AUCCCAUG CUGAUGAG GCCGUUAGGC CGAA AGUUAAGG | 2738 |
| 878 | CUUAACUU C AUGGGAUA | 230 | UAUCCCAU CUGAUGAG GCCGUUAGGC CGAA AAGUUAAG | 2739 |
| 886 | CAUGGGAU A UGUAAUUG | 231 | CAAUUACA CUGAUGAG GCCGUUAGGC CGAA AUCCCAUG | 2740 |
| 890 | GGAUAUGU A AUUGGGAG | 232 | CUCCCAAU CUGAUGAG GCCGUUAGGC CGAA ACAUAUCC | 2741 |
| 893 | UAUGUAAU U GGGAGUUG | 233 | CAACUCCC CUGAUGAG GCCGUUAGGC CGAA AUUACAUA | 2742 |
| 900 | UUGGGAGU U UGGGCACA | 234 | UGUGCCCC CUGAUGAG GCCGUUAGGC CGAA ACUCCCAA | 2743 |
| 910 | GGGCACAU U GCCACAGG | 235 | CCUGUGGC CUGAUGAG GCCGUUAGGC CGAA AUGUGCCC | 2744 |
| 924 | AGGAACAU A UUGUACAA | 236 | UUGUACAA CUGAUGAG GCCGUUAGGC CGAA AUGUUCCU | 2745 |
| 926 | GAACAUAU U GUACAAAA | 237 | UUUUGUAC CUGAUGAG GCCGUUAGGC CGAA AUAUGUUC | 2746 |
| 929 | CAUAUUGU A CAAAAAAU | 238 | AUUUUUUG CUGAUGAG GCCGUUAGGC CGAA ACAAUAUG | 2747 |
| 938 | CAAAAAAU C AAAAUGUG | 239 | CACAUUUU CUGAUGAG GCCGUUAGGC CGAA AUUUUUUG | 2748 |
| 948 | AAAUGUGU U UUAGGAAA | 240 | UUUCCUAA CUGAUGAG GCCGUUAGGC CGAA ACACAUUU | 2749 |
| 949 | AAUGUGUU U UAGGAAAC | 241 | GUUUCCUA CUGAUGAG GCCGUUAGGC CGAA AACACAUU | 2750 |
| 950 | AUGUGUUU U AGGAAACU | 242 | AGUUUCCU CUGAUGAG GCCGUUAGGC CGAA AAACACAU | 2751 |
| 951 | UGUGUUUU A GGAAACUU | 243 | AAGUUUCC CUGAUGAG GCCGUUAGGC CGAA AAAACACA | 2752 |
| 959 | AGGAAACU U CCUGUAAA | 244 | UUUACAGG CUGAUGAG GCCGUUAGGC CGAA AGUUUCCU | 2753 |
| 960 | GGAAACUU C CUGUAAAC | 245 | GUUUACAG CUGAUGAG GCCGUUAGGC CGAA AAGUUUCC | 2754 |
| 965 | CUUCCUGU A AACAGGCC | 246 | GGCCUGUU CUGAUGAG GCCGUUAGGC CGAA ACAGGAAG | 2755 |
| 975 | ACAGGCCU A UUGAUUGG | 247 | CCAAUCAA CUGAUGAG GCCGUUAGGC CGAA AGGCCUGU | 2756 |
| 977 | AGGCCUAU U GAUUGGAA | 248 | UUCCAAUC CUGAUGAG GCCGUUAGGC CGAA AUAGGCCU | 2757 |
| 981 | CUAUUGAU U GGAAAGUA | 249 | UACUUUCC CUGAUGAG GCCGUUAGGC CGAA AUCAAUAG | 2758 |
| 989 | UGGAAAGU A UGUCAACG | 250 | CGUUGACA CUGAUGAG GCCGUUAGGC CGAA ACUUUCCA | 2759 |
| 993 | AAGUAUGU C AACGAAUU | 251 | AAUUCGUU CUGAUGAG GCCGUUAGGC CGAA ACAUACUU | 2760 |
| 1001 | CAACGAAU U GUGGGUCU | 252 | AGACCCAC CUGAUGAG GCCGUUAGGC CGAA AUUCGUUG | 2761 |
| 1008 | UUGUGGGU C UUUUGGGG | 253 | CCCCAAAA CUGAUGAG GCCGUUAGGC CGAA ACCCACAA | 2762 |
| 1010 | GUGGGUCU U UUGGGGUU | 254 | AACCCCAA CUGAUGAG GCCGUUAGGC CGAA AGACCCAC | 2763 |
| 1011 | UGGGUCUU U UGGGGUUU | 255 | AAACCCCA CUGAUGAG GCCGUUAGGC CGAA AAGACCCA | 2764 |
| 1012 | GGGUCUUU U GGGGUUUG | 256 | CAAACCCC CUGAUGAG GCCGUUAGGC CGAA AAAGACCC | 2765 |
| 1018 | UUUGGGGU U UGCCGCCC | 257 | GGGCGGCA CUGAUGAG GCCGUUAGGC CGAA ACCCCAAA | 2766 |
| 1019 | UUGGGGUU U GCCGCCCC | 258 | GGGGCGGC CUGAUGAG GCCGUUAGGC CGAA AACCCCAA | 2767 |
| 1029 | CCGCCCCU U UCACGCAA | 259 | UUGCGUGA CUGAUGAG GCCGUUAGGC CGAA AGGGGCGG | 2768 |
| 1030 | CGCCCCUU U CACGCAAU | 260 | AUUGCGUG CUGAUGAG GCCGUUAGGC CGAA AAGGGGCG | 2769 |
| 1031 | GCCCCUUU C ACGCAAUG | 261 | CAUUGCGU CUGAUGAG GCCGUUAGGC CGAA AAAGGGGC | 2770 |
| 1045 | AUGUGGAU A UUCUGCUU | 262 | AAGCAGAA CUGAUGAG GCCGUUAGGC CGAA AUCCACAU | 2771 |
| 1047 | GUGGAUAU U CUGCUUUA | 263 | UAAAGCAG CUGAUGAG GCCGUUAGGC CGAA AUAUCCAC | 2772 |
| 1048 | UGGAUAUU C UGCUUUAA | 264 | UUAAAGCA CUGAUGAG GCCGUUAGGC CGAA AAUAUCCA | 2773 |
| 1053 | AUUCUGCU U UAAUGCCU | 265 | AGGCAUUA CUGAUGAG GCCGUUAGGC CGAA AGCAGAAU | 2774 |
| 1054 | UUCUGCUU U AAUGCCUU | 266 | AAGGCAUU CUGAUGAG GCCGUUAGGC CGAA AAGCAGAA | 2775 |
| 1055 | UCUGCUUU A AUGCCUUU | 267 | AAAGGCAU CUGAUGAG GCCGUUAGGC CGAA AAAGCAGA | 2776 |
| 1062 | UAAUGCCU U UAUAUGCA | 268 | UGCAUAUA CUGAUGAG GCCGUUAGGC CGAA AGGCAUUA | 2777 |
| 1063 | AAUGCCUU U AUAUGCAU | 269 | AUGCAUAU CUGAUGAG GCCGUUAGGC CGAA AAGGCAUU | 2778 |
| 1064 | AUGCCUUU A UAUGCAUG | 270 | CAUGCAUA CUGAUGAG GCCGUUAGGC CGAA AAAGGCAU | 2779 |
| 1066 | GCCUUUAU A UGCAUGCA | 271 | UGCAUGCA CUGAUGAG GCCGUUAGGC CGAA AUAAAGGC | 2780 |
| 1076 | GCAUGCAU A CAAGCAAA | 272 | UUUGCUUG CUGAUGAG GCCGUUAGGC CGAA AUGCAUGC | 2781 |
| 1092 | AACAGGCU U UUACUUUC | 273 | GAAAGUAA CUGAUGAG GCCGUUAGGC CGAA AGCCUGUU | 2782 |
| 1093 | ACAGGCUU U UACUUUCU | 274 | AGAAAGUA CUGAUGAG GCCGUUAGGC CGAA AAGCCUGU | 2783 |
| 1094 | CAGGCUUU U ACUUUCUC | 275 | GAGAAAGU CUGAUGAG GCCGUUAGGC CGAA AAAGCCUG | 2784 |
| 1095 | AGGCUUUU A CUUUCUCG | 276 | CGAGAAAG CUGAUGAG GCCGUUAGGC CGAA AAAAGCCU | 2785 |
| 1098 | CUUUUACU U UCUCGCCA | 277 | UGGCGAGA CUGAUGAG GCCGUUAGGC CGAA AGUAAAAG | 2786 |
| 1099 | UUUUACUU U CUCGCCAA | 278 | UUGGCGAG CUGAUGAG GCCGUUAGGC CGAA AAGUAAAA | 2787 |
| 1100 | UUUACUUU C UCGCCAAC | 279 | GUUGGCGA CUGAUGAG GCCGUUAGGC CGAA AAAGUAAA | 2788 |
| 1102 | UACUUUCU C GCCAACUU | 280 | AAGUUGGC CUGAUGAG GCCGUUAGGC CGAA AGAAAGUA | 2789 |
| 1110 | CGCCAACU U ACAAGGCC | 281 | GGCCUUGU CUGAUGAG GCCGUUAGGC CGAA AGUUGGCG | 2790 |
| 1111 | GCCAACUU A CAAGGCCU | 282 | AGGCCUUG CUGAUGAG GCCGUUAGGC CGAA AAGUUGGC | 2791 |
| 1120 | CAAGGCCU U UCUAAGUA | 283 | UACUUAGA CUGAUCAG GCCGUUAGGC CGAA AGGCCUUG | 2792 |
| 1121 | AAGGCCUU U CUAAGUAA | 284 | UUACUUAG CUGAUGAG GCCGUUAGGC CGAA AAGGCCUU | 2793 |
| 1122 | AGGCCUUU C UAAGUAAA | 285 | UUUACUUA CUGAUGAG GCCGUUAGGC CGAA AAAGGCCU | 2794 |
| 1124 | GCCUUUCU A AGUAAACA | 286 | UGUUUACU CUGAUGAG GCCGUUAGGC CGAA AGAAAGGC | 2795 |
| 1128 | UUCUAAGU A AACAGUAU | 287 | AUACUGUU CUGAUGAG GCCGUUAGGC CGAA ACUUAGAA | 2796 |
| 1135 | UAAACAGU A UGUGAACC | 288 | GGUUCACA CUGAUGAG GCCGUUAGGC CGAA ACUGUUUA | 2797 |
| 1145 | GUGAACCU U UACCCCGU | 289 | ACGGGGUA CUGAUGAG GCCGUUAGGC CGAA AGGUUCAC | 2798 |
| 1146 | UGAACCUU U ACCCCGUU | 290 | AACGGGGU CUGAUGAG GCCGUUAGGC CGAA AAGGUUCA | 2799 |
| 1147 | GAACCUUU A CCCCGUUG | 291 | CAACGGGG CUGAUGAG GCCGUUAGGC CGAA AAAGGUUC | 2800 |
| 1154 | UACCCCGU U GCUCGGCA | 292 | UGCCGAGC CUGAUGAG GCCGUUAGGC CGAA ACGGGGUA | 2801 |
| 1158 | CCGUUGCU C GGCAACGG | 293 | CCGUUGCC CUGAUGAG GCCGUUAGGC CGAA AGCAACGG | 2802 |
| 1173 | GGCCUGGU C UAUGCCAA | 294 | UUGGCAUA CUGAUGAG GCCGUUAGGC CGAA ACCAGGCC | 2803 |
| 1175 | CCUGGUCU A UGCCAAGU | 295 | ACUUGGCA CUGAUGAG GCCGUUAGGC CGAA AGACCAGG | 2804 |
| 1186 | CCAAGUGU U UGCUGACG | 296 | CGUCAGCA CUGAUGAG GCCGUUAGGC CGAA ACACUUGG | 2805 |
| 1187 | CAAGUGUU U GCUGACGC | 297 | GCGUCAGC CUGAUGAG GCCGUUAGGC CGAA AACACUUG | 2806 |
| 1209 | CCACUGGU U GGGGCUUG | 298 | CAAGCCCC CUGAUGAG GCCGUUAGGC CGAA ACCAGUGG | 2807 |
| 1216 | UUGGGGCU U GGCCAUAG | 299 | CUAUGGCC CUGAUGAG GCCGUUAGGC CGAA AGCCCCAA | 2808 |
| 1223 | UUGGCCAU A GGCCAUCA | 300 | UGAUGGCC CUGAUGAG GCCGUUAGGC CGAA AUGGCCAA | 2809 |
| 1230 | UAGGCCAU C AGCGCAUG | 301 | CAUGCGCU CUGAUGAG GCCGUUAGGC CGAA AUGGCCUA | 2810 |
| 1249 | UGGAACCU U UGUGUCUC | 302 | GAGACACA CUGAUGAG GCCGUUAGGC CGAA AGGUUCCA | 2811 |
| 1250 | GGAACCUU U GUGUCUCC | 303 | GGAGACAC CUGAUGAG GCCGUUAGGC CGAA AAGGUUCC | 2812 |
| 1255 | CUUUGUGU C UCCUCUGC | 304 | GCAGAGGA CUGAUGAG GCCGUUAGGC CGAA ACACAAAG | 2813 |
| 1257 | UUGUGUCU C CUCUGCCG | 305 | CGGCAGAG CUGAUGAG GCCGUUAGGC CGAA AGACACAA | 2814 |
| 1260 | UGUCUCCU C UGCCGAUC | 306 | GAUCGGCA CUGAUGAG GCCGUUAGGC CGAA AGGAGACA | 2815 |
| 1268 | CUGCCGAU C CAUACCGC | 307 | GCGGUAUG CUGAUGAG GCCGUUAGGC CGAA AUCGGCAG | 2816 |
| 1272 | CGAUCCAU A CCGCGGAA | 308 | UUCCGCGG CUGAUGAG GCCGUUAGGC CGAA AUGGAUCG | 2817 |
| 1283 | GCGGAACU C CUAGCCGC | 309 | GCGGCUAG CUGAUGAG GCCGUUAGGC CGAA AGUUCCGC | 2818 |
| 1286 | GAACUCCU A GCCGCUUG | 310 | CAAGCGGC CUGAUGAG GCCGUUAGGC CGAA AGGAGUUC | 2819 |
| 1293 | UAGCCGCU U GUUUUGCU | 311 | AGCAAAAC CUGAUGAG GCCGUUAGGC CGAA AGCGGCUA | 2820 |
| 1296 | CCGCUUGU U UUGCUCGC | 312 | GCGAGCAA CUGAUGAG GCCGUUAGGC CGAA ACAAGCGG | 2821 |
| 1297 | CGCUUGUU U UGCUCGCA | 313 | UGCGAGCA CUGAUGAG GCCGUUAGGC CGAA AACAAGCG | 2822 |
| 1298 | GCUUGUUU U GCUCGCAG | 314 | CUGCGAGC CUGAUGAG GCCGUUAGGC CGAA AAACAAGC | 2823 |
| 1302 | GUUUUGCU C GCAGCAGG | 315 | CCUGCUGC CUGAUGAG GCCGUUAGGC CGAA AGCAAAAC | 2824 |
| 1312 | CAGCAGGU C UGGGGCAA | 316 | UUGCCCCA CUGAUGAG GCCGUUAGGC CGAA ACCUGCUG | 2825 |
| 1325 | GCAAAACU C AUCGGGAC | 317 | GUCCCGAU CUGAUGAG GCCGUUAGGC CGAA AGUUUUGC | 2826 |
| 1328 | AAACUCAU C GGGACUGA | 318 | UCAGUCCC CUGAUGAG GCCGUUAGGC CGAA AUGAGUUU | 2827 |
| 1341 | CUGACAAU U CUGUCGUG | 319 | CACGACAG CUGAUGAG GCCGUUAGGC CGAA AUUGUCAG | 2828 |
| 1342 | UGACAAUU C UGUCGUGC | 320 | GCACGACA CUGAUGAG GCCGUUAGGC CGAA AAUUGUCA | 2829 |
| 1346 | AAUUCUGU C GUGCUCUC | 321 | GAGAGCAC CUGAUGAG GCCGUUAGGC CGAA ACAGAAUU | 2830 |
| 1352 | GUCGUGCU C UCCCGCAA | 322 | UUGCGGGA CUGAUGAG GCCGUUAGGC CGAA AGCACGAC | 2831 |
| 1354 | CGUGCUCU C CCGCAAAU | 323 | AUUUGCGG CUGAUGAG GCCGUUAGGC CGAA AGAGCACG | 2832 |
| 1363 | CCGCAAAU A UACAUCAU | 324 | AUGAUGUA CUGAUGAG GCCGUUAGGC CGAA AUUUGCGG | 2833 |
| 1365 | GCAAAUAU A CAUCAUUU | 325 | AAAUGAUG CUGAUGAG GCCGUUAGGC CGAA AUAUUUGC | 2834 |
| 1369 | AUAUACAU C AUUUCCAU | 326 | AUGGAAAU CUGAUGAG GCCGUUAGGC CGAA AUGUAUAU | 2835 |
| 1372 | UACAUCAU U UCCAUGGC | 327 | GCCAUGGA CUGAUGAG GCCGUUAGGC CGAA AUGAUGUA | 2836 |
| 1373 | ACAUCAUU U CCAUGGCU | 328 | AGCCAUGG CUGAUGAG GCCGUUAGGC CGAA AAUGAUGU | 2837 |
| 1374 | CAUCAUUU C CAUGGCUG | 329 | CAGCCAUG CUGAUGAG GCCGUUAGGC CGAA AAAUGAUG | 2838 |
| 1385 | UGGCUGCU A GGCUGUGC | 330 | GCACAGCC CUGAUGAG GCCGUUAGGC CGAA AGCAGCCA | 2839 |
| 1406 | AACUGGAU C CUACGCGG | 331 | CCGCGUAG CUGAUGAG GCCGUUAGGC CGAA AUCCAGUU | 2840 |
| 1409 | UGGAUCCU A CGCGGGAC | 332 | GUCCCGCG CUGAUGAG GCCGUUAGGC CGAA AGGAUCCA | 2841 |
| 1420 | CGGGACGU C CUUUGUUU | 333 | AAACAAAG CUGAUGAG GCCGUUAGGC CGAA ACGUCCCG | 2842 |
| 1423 | GACGUCCU U UGUUUACG | 334 | CGUAAACA CUGAUGAG GCCGUUAGGC CGAA AGGACGUC | 2843 |
| 1424 | ACGUCCUU U GUUUACGU | 335 | ACGUAAAC CUGAUGAG GCCGUUAGGC CGAA AAGGACGU | 2844 |
| 1427 | UCCUUUGU U UACGUCCC | 336 | GGGACGUA CUGAUGAG GCCGUUAGGC CGAA ACAAAGGA | 2845 |
| 1428 | CCUUUGUU U ACGUCCCG | 337 | CGGGACGU CUGAUGAG GCCGUUAGGC CGAA AACAAAGG | 2846 |
| 1429 | CUUUGUUU A CGUCCCGU | 338 | ACGGGACG CUGAUGAG GCCGUUAGGC CGAA AAACAAAG | 2847 |
| 1433 | GUUUACGU C CCGUCGGC | 339 | GCCGACGG CUGAUGAG GCCGUUAGGC CGAA ACGUAAAC | 2848 |
| 1438 | CGUCCCGU C GGCGCUGA | 340 | UCAGCGCC CUGAUGAG GCCGUUAGGC CGAA ACGGGACG | 2849 |
| 1449 | CGCUGAAU C CCGCGGAC | 341 | GUCCGCGG CUGAUGAG GCCGUUAGGC CGAA AUUCAGCG | 2850 |
| 1465 | CGACCCCU C CCGGGGCC | 342 | GGCCCCGG CUGAUGAG GCCGUUAGGC CGAA AGGGGUCG | 2851 |
| 1477 | GGGCCGCU U GGGGCUCU | 343 | AGAGCCCC CUGAUGAG GCCGUUAGGC CGAA AGCGGCCC | 2852 |
| 1484 | UUGGGGCU C UACCGCCC | 344 | GGGCGGUA CUGAUGAG GCCGUUAGGC CGAA AGCCCCAA | 2853 |
| 1486 | GGGGCUCU A CCGCCCGC | 345 | GCGGGCGG CUGAUGAG GCCGUUAGGC CGAA AGAGCCCC | 2854 |
| 1496 | CGCCCGCU U CUCCGCCU | 346 | AGGCGGAG CUGAUGAG GCCGUUAGGC CGAA AGCGGGCG | 2855 |
| 1497 | GCCCGCUU C UCCGCCUA | 347 | UAGGCGGA CUGAUGAG GCCGUUAGGC CGAA AAGCGGGC | 2856 |
| 1499 | CCGCUUCU C CGCCUAUU | 348 | AAUAGGCG CUGAUGAG GCCGUUAGGC CGAA AGAAGCGG | 2857 |
| 1505 | CUCCGCCU A UUGUACCG | 349 | CGGUACAA CUGAUGAG GCCGUUAGGC CGAA AGGCGGAG | 2858 |
| 1507 | CCGCCUAU U GUACCGAC | 350 | GUCGGUAC CUGAUGAG GCCGUUAGGC CGAA AUAGGCGG | 2859 |
| 1510 | CCUAUUGU A CCGACCGU | 351 | ACGGUCGG CUGAUGAG GCCGUUAGGC CGAA ACAAUAGG | 2860 |
| 1519 | CCGACCGU C CACGGGGC | 352 | GCCCCGUG CUGAUGAG GCCGUUAGGC CGAA ACGGUCGG | 2861 |
| 1534 | GCGCACCU C UCUUUACG | 353 | CGUAAAGA CUGAUGAG GCCGUUAGGC CGAA AGGUGCGC | 2862 |
| 1536 | GCACCUCU C UUUACGCG | 354 | CGCGUAAA CUGAUGAG GCCGUUAGGC CGAA AGAGGUGC | 2863 |
| 1538 | ACCUCUCU U UACGCGGA | 355 | UCCGCGUA CUGAUGAG GCCGUUAGGC CGAA AGAGAGGU | 2864 |
| 1539 | CCUCUCUU U ACGCGGAC | 356 | GUCCGCGU CUGAUGAG GCCGUUAGGC CGAA AAGAGAGG | 2865 |
| 1540 | CUCUCUUU A CGCGGACU | 357 | AGUCCGCG CUGAUGAG GCCGUUAGGC CGAA AAAGAGAG | 2866 |
| 1549 | CGCGGACU C CCCGUCUG | 358 | CAGACGGG CUGAUGAG GCCGUUAGGC CGAA AGUCCGCG | 2867 |
| 1555 | CUCCCCGU C UGUGCCUU | 359 | AAGGCACA CUGAUGAG GCCGUUAGGC CGAA ACGGGGAG | 2868 |
| 1563 | CUGUGCCU U CUCAUCUG | 360 | CAGAUGAG CUGAUGAG GCCGUUAGGC CGAA AGGCACAG | 2869 |
| 1564 | UGUGCCUU C UCAUCUGC | 361 | GCAGAUGA CUGAUGAG GCCGUUAGGC CGAA AAGGCACA | 2870 |
| 1566 | UGCCUUCU C AUCUGCCG | 362 | CGGCAGAU CUGAUGAG GCCGUUAGGC CGAA AGAAGGCA | 2871 |
| 1569 | CUUCUCAU C UGCCGGAC | 363 | GUCCGGCA CUGAUGAG GCCGUUAGGC CGAA AUGAGAAG | 2872 |
| 1588 | UGUGCACU U CGCUUCAC | 364 | GUGAAGCG CUGAUGAG GCCGUUAGGC CGAA AGUGCACA | 2873 |
| 1589 | GUGCACUU C GCUUCACC | 365 | GGUGAAGC CUGAUGAG GCCGUUAGGC CGAA AAGUGCAC | 2874 |
| 1593 | ACUUCGCU U CACCUCUG | 366 | CAGAGGUG CUGAUGAG GCCGUUAGGC CGAA AGCGAAGU | 2875 |
| 1594 | CUUCGCUU C ACCUCUGC | 367 | GCAGAGGU CUGAUGAG GCCGUUAGGC CGAA AAGCGAAG | 2876 |
| 1599 | CUUCACCU C UGCACGUC | 368 | GACGUGCA CUGAUGAG GCCGUUAGGC CGAA AGGUGAAG | 2877 |
| 1607 | CUGCACGU C GCAUGGAG | 369 | CUCCAUGC CUGAUGAG GCCGUUAGGC CGAA ACGUGCAG | 2878 |
| 1651 | CCCAAGGU C UUGCAUAA | 370 | UUAUGCAA CUGAUGAG GCCGUUAGGC CGAA ACCUUGGG | 2879 |
| 1653 | CAAGGUCU U GCAUAAGA | 371 | UCUUAUGC CUGAUGAG GCCGUUAGGC CGAA AGACCUUG | 2880 |
| 1658 | UCUUGCAU A AGAGGACU | 372 | AGUCCUCU CUGAUGAG GCCGUUAGGC CGAA AUGCAAGA | 2881 |
| 1667 | AGAGGACU C UUGGACUU | 373 | AAGUCCAA CUGAUGAG GCCGUUAGGC CGAA AGUCCUCU | 2882 |
| 1669 | AGGACUCU U GGACUUUC | 374 | GAAAGUCC CUGAUGAG GCCGUUAGGC CGAA AGAGUCCU | 2883 |
| 1675 | CUUGGACU U UCAGCAAU | 375 | AUUGCUGA CUGAUGAG GCCGUUAGGC CGAA AGUCCAAG | 2884 |
| 1676 | UUGGACUU U CAGCAAUG | 376 | CAUUGCUG CUGAUGAG GCCGUUAGGC CGAA AAGUCCAA | 2885 |
| 1677 | UGGACUUU C AGCAAUGU | 377 | ACAUUGCU CUGAUGAG GCCGUUAGGC CGAA AAAGUCCA | 2886 |
| 1686 | AGCAAUGU C AACGACCG | 378 | CGGUCGUU CUGAUGAG GCCGUUAGGC CGAA ACAUUGCU | 2887 |
| 1699 | ACCGACCU U GAGGCAUA | 379 | UAUGCCUC CUGAUGAG GCCGUUAGGC CGAA AGGUCGGU | 2888 |
| 1707 | UGAGGCAU A CUUCAAAG | 380 | CUUUGAAG CUGAUGAG GCCGUUAGGC CGAA AUGCCUCA | 2889 |
| 1710 | GGCAUACU U CAAAGACU | 381 | AGUCUUUG CUGAUGAG GCCGUUAGGC CGAA AGUAUGCC | 2890 |
| 1711 | GCAUACUU C AAAGACUG | 382 | CAGUCUUU CUGAUGAG GCCGUUAGGC CGAA AAGUAUGC | 2891 |
| 1725 | CUGUGUGU U UAAUGAGU | 383 | ACUCAUUA CUGAUGAG GCCGUUAGGC CGAA ACACACAG | 2892 |
| 1726 | UGUGUGUU U AAUGAGUG | 384 | CACUCAUU CUGAUGAG GCCGUUAGGC CGAA AACACACA | 2893 |
| 1727 | GUGUGUUU A AUGAGUGG | 385 | CCACUCAU CUGAUGAG GCCGUUAGGC CGAA AAACACAC | 2894 |
| 1743 | GGAGGAGU U GGGGGAGG | 386 | CCUCCCCC CUGAUGAG GCCGUUAGGC CGAA ACUCCUCC | 2895 |
| 1756 | GAGGAGGU U AGGUUAAA | 387 | UUUAACCU CUGAUGAG GCCGUUAGGC CGAA ACCUCCUC | 2896 |
| 1757 | AGGAGGUU A GGUUAAAG | 388 | CUUUAACC CUGAUGAG GCCGUUAGGC CGAA AACCUCCU | 2897 |
| 1761 | GGUUAGGU U AAAGGUCU | 389 | AGACCUUU CUGAUGAG GCCGUUAGGC CGAA ACCUAACC | 2898 |
| 1762 | GUUAGGUU A AAGGUCUU | 390 | AAGACCUU CUGAUGAG GCCGUUAGGC CGAA AACCUAAC | 2899 |
| 1768 | UUAAAGGU C UUUGUACU | 391 | AGUACAAA CUGAUGAG GCCGUUAGGC CGAA ACCUUUAA | 2900 |
| 1770 | AAAGGUCU U UGUACUAG | 392 | CUAGUACA CUGAUGAG GCCGUUAGGC CGAA AGACCUUU | 2901 |
| 1771 | AAGGUCUU U GUACUAGG | 393 | CCUAGUAC CUGAUGAG GCCGUUAGGC CGAA AAGACCUU | 2902 |
| 1774 | GUCUUUGU A CUAGGAGG | 394 | CCUCCUAG CUGAUGAG GCCGUUAGGC CGAA ACAAAGAC | 2903 |
| 1777 | UUUGUACU A UGAGGCUG | 395 | CAGCCUCC CUGAUGAG GCCGUUAGGC CGAA AGUACAAA | 2904 |
| 1787 | GAGGCUGU A GGCAUAAA | 396 | UUUAUGCC CUGAUGAG GCCGUUAGGC CGAA ACAGCCUC | 2905 |
| 1793 | GUAGGCAU A AAUUGGUG | 397 | CACCAAUU CUGAUGAG GCCGUUAGGC CGAA AUGCCUAC | 2906 |
| 1797 | GCAUAAAU U GGUGUGUU | 398 | AACACACC CUGAUGAG GCCGUUAGGC CGAA AUUUAUGC | 2907 |
| 1805 | UGGUGUGU U CACCAGCA | 399 | UGCUGGUG CUGAUGAG GCCGUUAGGC CGAA ACACACCA | 2908 |
| 1806 | GGUGUGUU C ACCAGCAC | 400 | GUGCUGGU CUGAUGAG GCCGUUAGGC CGAA AACACACC | 2909 |
| 1824 | AUGCAACU U UUUCACCU | 401 | AGGUGAAA CUGAUGAG GCCGUUAGGC CGAA AGUUGCAU | 2910 |
| 1825 | UGCAACUU U UUCACCUC | 402 | GAGGUGAA CUGAUGAG GCCGUUAGGC CGAA AAGUUGCA | 2911 |
| 1826 | GCAACUUU U UCACCUCU | 403 | AGAGGUGA CUGAUGAG GCCGUUAGGC CGAA AAAGUUGC | 2912 |
| 1827 | CAACUUUU U CACCUCUG | 404 | CAGAGGUG CUGAUGAG GCCGUUAGGC CGAA AAAAGUUG | 2913 |
| 1828 | AACUUUUU C ACCUCUGC | 405 | GCAGAGGU CUGAUGAG GCCGUUAGGC CGAA AAAAAGUU | 2914 |
| 1833 | UUUCACCU C UGCCUAAU | 406 | AUUAGGCA CUGAUGAG GCCGUUAGGC CGAA AGGUGAAA | 2915 |
| 1839 | CUCUGCCU A AUCAUCUC | 407 | GAGAUGAU CUGAUGAG GCCGUUAGGC CGAA AGGCAGAG | 2916 |
| 1842 | UGCCUAAU C AUCUCAUG | 408 | CAUGAGAU CUGAUGAG GCCGUUAGGC CGAA AUUAGGCA | 2917 |
| 1845 | CUAAUCAU C UCAUGUUC | 409 | GAACAUGA CUGAUGAG GCCGUUAGGC CGAA AUGAUUAG | 2918 |
| 1847 | AAUCAUCU C AUGUUCAU | 410 | AUGAACAU CUGAUGAG GCCGUUAGGC CGAA AGAUGAUU | 2919 |
| 1852 | UCUCAUGU U CAUGUCCU | 411 | AGGACAUG CUGAUGAG GCCGUUAGGC CGAA ACAUGAGA | 2920 |
| 1853 | CUCAUGUU C AUGUCCUA | 412 | UAGGACAU CUGAUGAG GCCGUUAGGC CGAA AACAUGAG | 2921 |
| 1858 | GUUCAUGU C CUACUGUU | 413 | AACAGUAG CUGAUGAG GCCGUUAGGC CGAA ACAUGAAC | 2922 |
| 1861 | CAUGUCCU A CUGUUCAA | 414 | UUGAACAG CUGAUGAG GCCGUUAGGC CGAA AGGACAUG | 2923 |
| 1866 | CCUACUGU U CAAGCCUC | 415 | GAGGCUUG CUGAUGAG GCCGUUAGGC CGAA ACAGUAGG | 2924 |
| 1867 | CUACUGUU C AAGCCUCC | 416 | GGAGGCUU CUGAUGAG GCCGUUAGGC CGAA AACAGUAG | 2925 |
| 1874 | UCAAGCCU C CAAGCUGU | 417 | ACAGCUUG CUGAUGAG GCCGUUAGGC CGAA AGGCUUGA | 2926 |
| 1887 | CUGUGCCU U GGGUGGCU | 418 | AGCCACCC CUGAUGAG GCCGUUAGGC CGAA AGGCACAG | 2927 |
| 1896 | GGGUGGCU U UGGGGCAU | 419 | AUGCCCCA CUGAUGAG GCCGUUAGGC CGAA AGCCACCC | 2928 |
| 1897 | GGUGGCUU U GGGGCAUG | 420 | CAUGCCCC CUGAUGAG GCCGUUAGGC CGAA AAGCCACC | 2929 |
| 1911 | AUGGACAU U GACCCGUA | 421 | UACGGGUC CUGAUGAG GCCGUUAGGC CGAA AUGUCCAU | 2930 |
| 1919 | UGACCCGU A UAAAGAAU | 422 | AUUCUUUA CUGAUGAG GCCGUUAGGC CGAA ACGGGUCA | 2931 |
| 1921 | ACCCGUAU A AAGAAUUU | 423 | AAAUUCUU CUGAUGAG GCCGUUAGGC CGAA AUACGGGU | 2932 |
| 1928 | UAAAGAAU U UGGAGCUU | 424 | AAGCUCCA CUGAUGAG GCCGUUAGGC CGAA AUUCUUUA | 2933 |
| 1929 | AAAGAAUU U GGAGCUUC | 425 | GAAGCUCC CUGAUGAG GCCGUUAGGC CGAA AAUUCUUU | 2934 |
| 1936 | UUGGAGCU U CUGUGGAG | 426 | CUCCACAG CUGAUGAG GCCGUUAGGC CGAA AGCUCCAA | 2935 |
| 1937 | UGGAGCUU C UGUGGAGU | 427 | ACUCCACA CUGAUGAG GCCGUUAGGC CGAA AAGCUCCA | 2936 |
| 1946 | UGUGGAGU U ACUCUCUU | 428 | AAGAGAGU CUGAUGAG GCCGUUAGGC CGAA ACUCCACA | 2937 |
| 1947 | GUGGAGUU A CUCUCUUU | 429 | AAAGAGAG CUGAUGAG GCCGUUAGGC CGAA AACUCCAC | 2938 |
| 1950 | GAGUUACU C UCUUUUUU | 430 | AAAAAAGA CUGAUGAG GCCGUUAGGC CGAA AGUAACUC | 2939 |
| 1952 | GUUACUCU C UUUUUUGC | 431 | GCAAAAAA CUGAUGAG GCCGUUAGGC CGAA AGAGUAAC | 2940 |
| 1954 | UACUCUCU U UUUUGCCU | 432 | AGGCAAAA CUGAUGAG GCCGUUAGGC CGAA AGAGAGUA | 2941 |
| 1955 | ACUCUCUU U UUUGCCUU | 433 | AAGGCAAA CUGAUGAG GCCGUUAGGC CGAA AAGAGAGU | 2942 |
| 1956 | CUCUCUUU U UUGCCUUC | 434 | GAAGGCAA CUGAUGAG GCCGUUAGGC CGAA AAAGAGAG | 2943 |
| 1957 | UCUCUUUU U UGCCUUCU | 435 | AGAAGGCA CUGAUGAG GCCGUUAGGC CGAA AAAAGAGA | 2944 |
| 1958 | CUCUUUUU U GCCUUCUG | 436 | CAGAAGGC CUGAUGAG GCCGUUAGGC CGAA AAAAAGAG | 2945 |
| 1963 | UUUUGCCU U CUGACUUC | 437 | GAAGUCAG CUGAUGAG GCCGUUAGGC CGAA AGGCAAAA | 2946 |
| 1964 | UUUGCCUU C UGACUUCU | 438 | AGAAGUCA CUGAUGAG GCCGUUAGGC CGAA AAGGCAAA | 2947 |
| 1970 | UUCUGACU U CUUUCCUU | 439 | AAGGAAAG CUGAUGAG GCCGUUAGGC CGAA AGUCAGAA | 2948 |
| 1971 | UCUGACUU C UUUCCUUC | 440 | GAAGGAAA CUGAUGAG GCCGUUAGGC CGAA AAGUCAGA | 2949 |
| 1973 | UGACUUCU U UCCUUCUA | 441 | UAGAAGGA CUGAUGAG GCCGUUAGGC CGAA AGAAGUCA | 2950 |
| 1974 | GACUUCUU U CCUUCUAU | 442 | AUAGAAGG CUGAUGAG GCCGUUAGGC CGAA AAGAAGUC | 2951 |
| 1975 | ACUUCUUU C CUUCUAUU | 443 | AAUAGAAG CUGAUGAG GCCGUUAGGC CGAA AAAGAAGU | 2952 |
| 1978 | UCUUUCCU U CUAUUCGA | 444 | UCGAAUAG CUGAUGAG GCCGUUAGGC CGAA AGGAAAGA | 2953 |
| 1979 | CUUUCCUU C UAUUCGAG | 445 | CUCGAAUA CUGAUGAG GCCGUUAGGC CGAA AAGGAAAG | 2954 |
| 1981 | UUCCUUCU A UUCGAGAU | 446 | AUCUCGAA CUGAUGAG GCCGUUAGGC CGAA AGAAGGAA | 2955 |
| 1983 | CCUUCUAU U CGAGAUCU | 447 | AGAUCUCG CUGAUGAG GCCGUUAGGC CGAA AUAGAAGG | 2956 |
| 1984 | CUUCUAUU C GAGAUCUC | 448 | GAGAUCUC CUGAUGAG GCCGUUAGGC CGAA AAUAGAAG | 2957 |
| 1990 | UUCGAGAU C UCCUGGAC | 449 | GUCGAGGA CUGAUGAG GCCGUUAGGC CGAA AUCUCGAA | 2958 |
| 1992 | CGAGAUCU C CUCGACAC | 450 | GUGUCGAG CUGAUGAG GCCGUUAGGC CGAA AGAUCUCG | 2959 |
| 1995 | GAUCUCCU C GACACCGC | 451 | GCGGUGUC CUGAUGAG GCCGUUAGGC CGAA AGGAGAUC | 2960 |
| 2006 | CACCGCCU C UGCUCUGU | 452 | ACAGACCA CUGAUGAG GCCGUUAGGC CGAA AGGCGGUG | 2961 |
| 2011 | CCUCUGCU C UGUAUCGG | 453 | CCGAUACA CUGAUGAG GCCGUUAGGC CGAA AGCAGAGG | 2962 |
| 2015 | UGCUCUGU A UCGGGGGG | 454 | CCCCCCGA CUGAUGAG GCCGUUAGGC CGAA ACAGAGCA | 2963 |
| 2017 | CUCUGUAU C GGGGGGCC | 45G | GGCCCCCC CUGAUGAG GCCGUUAGGC CGAA AUACAGAG | 2964 |
| 2027 | GGGGGCCU U AGAGUCUC | 456 | GAGACUCU CUGAUGAG GCCGUUAGGC CGAA AGGCCCCC | 2965 |
| 2028 | GGGGCCUU A GAGUCUCC | 457 | GGAGACUC CUGAUGAG GCCGUUAGGC CGAA AAGGCCCC | 2966 |
| 2033 | CUUAGAGU C UCCGGAAC | 458 | GUUCCGGA CUGAUGAG GCCGUUAGGC CGAA ACUCUAAG | 2967 |
| 2035 | UAGAGUCU C CGGAACAU | 459 | AUGUUCCG CUGAUGAG GCCGUUAGGC CGAA AGACUCUA | 2968 |
| 2044 | CGGAACAU U GUUCACCU | 460 | AGGUGAAC CUGAUGAG GCCGUUAGGC CGAA AUGUUCCG | 2969 |
| 2047 | AACAUUGU U CACCUCAC | 461 | GUGAGGUG CUGAUGAG GCCGUUAGGC CGAA ACAAUGUU | 2970 |
| 2048 | ACAUUGUU C ACCUCACC | 462 | GGUGAGGU CUGAUGAG GCCGUUAGGC CGAA AACAAUGU | 2971 |
| 2053 | GUUCACCU C ACCAUACG | 463 | CGUAUGGU CUGAUGAG GCCGUUAGGC CGAA AGGUGAAC | 2972 |
| 2059 | CUCACCAU A CGGCACUC | 464 | GAGUGCCG CUGAUGAG GCCGUUAGGC CGAA AUGGUGAG | 2973 |
| 2067 | ACGGCACU C AGGCAAGC | 465 | GCUUGCCU CUGAUGAG GCCGUUAGGC CGAA AGUGCCGU | 2974 |
| 2077 | GGCAAGCU A UUCUGUGU | 466 | ACACAGAA CUGAUGAG GCCGUUAGGC CGAA AGCUUGCC | 2975 |
| 2079 | CAAGCUAU U CUGUGUUG | 467 | CAACACAG CUGAUGAG GCCGUUAGGC CGAA AUAGCUUG | 2976 |
| 2080 | AAGCUAUU C UGUGUUGG | 468 | CCAACACA CUGAUGAG GCCGUUAGGC CGAA AAUAGCUU | 2977 |
| 2086 | UUCUGUGU U GGGGUGAG | 469 | CUCACCCC CUGAUGAG GCCGUUAGGC CGAA ACACAGAA | 2978 |
| 2096 | GGGUGAGU U GAUGAAUC | 470 | GAUUCAUC CUGAUGAG GCCGUUAGGC CGAA ACUCACCC | 2979 |
| 2104 | UGAUGAAU C UAGCCACC | 471 | GGUGGCUA CUGAUGAG GCCGUUAGGC CGAA AGUCAUCA | 2980 |
| 2106 | AUGAAUCU A GCCACCUG | 472 | CAGGUGGC CUGAUGAG GCCGUUAGGC CGAA AGAUUCAU | 2981 |
| 2125 | UGGGAAGU A AUUUGGAA | 473 | UUCCAAAU CUGAUGAG GCCGUUAGGC CGAA ACUUCCCA | 2982 |
| 2128 | GAAGUAAU U UGGAAGAU | 474 | AUCUUCCA CUGAUGAG GCCGUUAGGC CGAA AUUACUUC | 2983 |
| 2129 | AAGUAAUU U GGAAGAUC | 475 | GAUCUUCC CUGAUGAG GCCGUUAGGC CGAA AAUUACUU | 2984 |
| 2137 | UGGAAGAU C CAGCAUCC | 476 | GGAUGCUG CUGAUGAG GCCGUUAGGC CGAA AUCUUCCA | 2985 |
| 2144 | UCCAGCAU C CAGGGAAU | 477 | AUUCCCUG CUGAUGAG GCCGUUAGGC CGAA AUCCUGGA | 2986 |
| 2153 | CAGGGAAU U AGUAGUCA | 478 | UGACUACU CUGAUGAG GCCGUUAGGC CGAA AUUCCCUG | 2987 |
| 2154 | AGGGAAUU A GUAGUCAG | 479 | CUGACUAC CUGAUGAG GCCGUUAGGC CGAA AAUUCCCU | 2988 |
| 2157 | GAAUUAGU A GUCAGCUA | 480 | UAGCUGAC CUGAUGAG GCCGUUAGGC CGAA ACUAAUUC | 2989 |
| 2160 | UUAGUAGU C AGCUAUGU | 481 | ACAUAGCU CUGAUGAG GCCGUUAGGC CGAA ACUACUAA | 2990 |
| 2165 | AGUCAGCU A UGUCAACG | 482 | CGUGGACA CUGAUGAG GCCGUUAGGC CGAA AGCUGACU | 2991 |
| 2169 | AGCUAUGU C AACGUUAA | 483 | UUAACGUU CUGAUGAG GCCGUUAGGC CGAA ACAUAGCU | 2992 |
| 2175 | GUCAACGU U AAUAUGGG | 484 | CCCAUAUU CUGAUGAG GCCGUUAGGC CGAA ACGUUGAC | 2993 |
| 2176 | UCAACGUU A AUAUGGGC | 485 | GCCCAUAU CUGAUGAG GCCGUUAGGC CGAA AACGUUGA | 2994 |
| 2179 | ACGUUAAU A UGGGCCUA | 486 | UAGGCCCA CUCAUGAG GCCGUUAGGC CGAA AUUAACGU | 2995 |
| 2187 | AUGGGCCU A AAAAUCAG | 487 | CUGAUUUU CUGAUGAG GCCGUUAGGC CGAA AGGCCCAU | 2996 |
| 2193 | CUAAAAAU C AGACAACU | 488 | AGUUGUCU CUGAUGAG GCCGUUAGGC CGAA AUUUUUAG | 2997 |
| 2202 | AGACAACU A UUGUGGUU | 489 | AACCACAA CUGAUGAG GCCGUUAGGC CGAA AGUUGUCU | 2998 |
| 2204 | ACAACUAU U GUGGUUUC | 490 | GAAACCAC CUGAUGAG GCCGUUAGGC CGAA AUAGUUGU | 2999 |
| 2210 | AUUGUGGU U UCACAUUU | 491 | AAAUGUGA CUGAUGAG GCCGUUAGGC CGAA ACCACAAU | 3000 |
| 2211 | UUGUGGUU U CACAUUUC | 492 | GAAAUGUG CUGAUGAG GCCGUUAGGC CGAA AACCACAA | 3001 |
| 2212 | UGUGGUUU C ACAUUUCC | 493 | GGAAAUGU CUGAUGAG GCCGUUAGGC CGAA AAACCACA | 3002 |
| 2217 | UUUCACAU U UCCUGUCU | 494 | AGACAGGA CUGAUGAG GCCGUUAGGC CGAA AUGUGAAA | 3003 |
| 2218 | UUCACAUU U CCUGUCUU | 495 | AAGACAGG CUGAUGAG GCCGUUAGGC CGAA AAUGUGAA | 3004 |
| 2219 | UCACAUUU C CUGUCUUA | 496 | UAAGACAG CUGAUGAG GCCGUUAGGC CGAA AAAUGUGA | 3005 |
| 2224 | UUUCCUGU C UUACUUUU | 497 | AAAAGUAA CUGAUGAG GCCGUUAGGC CGAA ACAGGAAA | 3006 |
| 2226 | UCCUGUCU U ACUUUUGG | 498 | CCAAAAGU CUGAUGAG GCCGUUAGGC CGAA AGACAGGA | 3007 |
| 2227 | CCUGUCUU A CUUUUGGG | 499 | CCCAAAAG CUGAUGAG GCCGUUAGGC CGAA AAGACAGG | 3008 |
| 2230 | GUCUUACU U UUGGGCGA | 500 | UCGCCCAA CUGAUGAG GCCGUUAGGC CGAA AGUAAGAC | 3009 |
| 2231 | UCUUACUU U UGGGCGAG | 501 | CUCGCCCA CUGAUGAG GCCGUUAGGC CGAA AAGUAAGA | 3010 |
| 2232 | CUUACUUU U GGGCGAGA | 502 | UCUCGCCC CUGAUGAG GCCGUUAGGC CGAA AAAGUAAG | 3011 |
| 2247 | GAAACUGU U CUUGAAUA | 503 | UAUUCAAG CUGAUGAG GCCGUUAGGC CGAA ACAGUUUC | 3012 |
| 2248 | AAACUGUU C UUGAAUAU | 504 | AUAUUCAA CUGAUGAG GCCGUUAGGC CGAA AACAGUUU | 3013 |
| 2250 | ACUGUUCU U GAAUAUUU | 505 | AAAUAUUC CUGAUGAG GCCGUUAGGC CGAA AGAACAGU | 3014 |
| 2255 | UCUUGAAU A UUUGGUGU | 506 | ACACCAAA CUGAUGAG GCCGUUAGGC CGAA AUUCAAGA | 3015 |
| 2257 | UUGAAUAU U UGGUGUCU | 507 | AGACACCA CUGAUGAG GCCGUUAGGC CGAA AUAUUCAA | 3016 |
| 2258 | UGAAUAUU U GGUGUCUU | 508 | AAGACACC CUGAUGAG GCCGUUAGGC CGAA AAUAUUCA | 3017 |
| 2264 | UUUGGUGU C UUUUGGAG | 509 | CUCCAAAA CUGAUGAG GCCGUUAGGC CGAA ACACCAAA | 3018 |
| 2266 | UGGUGUCU U UUGGAGUG | 510 | CACUCCAA CUGAUGAG GCCGUUAGGC CGAA AGACACCA | 3019 |
| 2267 | GGUGUCUU U UGGAGUGU | 511 | ACACUCCA CUGAUGAG GCCGUUAGGC CGAA AAGACACC | 3020 |
| 2268 | GUGUCUUU U GGAGUGUG | 512 | CACACUCC CUGAUGAG GCCGUUAGGC CGAA AAAGACAC | 3021 |
| 2280 | GUGUGGAU U CGCACUCC | 513 | GGAGUGCG CUGAUGAG GCCGUUAGGC CGAA AUCCACAC | 3022 |
| 2281 | UGUGGAUU C GCACUCCU | 514 | AGGAGUGC CUGAUGAG GCCGUUAGGC CGAA AAUCCACA | 3023 |
| 2287 | UUCGCACU C CUCCUGCA | 515 | UGCAGGAG CUGAUGAG GCCGUUAGGC CGAA AGUGCGAA | 3024 |
| 2290 | GCACUCCU C CUGCAUAU | 516 | AUAUGCAG CUGAUGAG GCCGUUAGGC CGAA AGGAGUGC | 3025 |
| 2297 | UCCUGCAU A UAGACCAC | 517 | GUGGUCUA CUGAUGAG GCCGUUAGGC CGAA AUGCAGGA | 3026 |
| 2299 | CUGCAUAU A GACCACCA | 518 | UGGUGGUC CUGAUGAG GCCGUUAGGC CGAA AUAUGCAG | 3027 |
| 2317 | AUGCCCCU A UCUUAUCA | 519 | UGAUAAGA CUGAUGAG GCCGUUAGGC CGAA AGGGGCAU | 3028 |
| 2319 | GCCCCUAU C UUAUCAAC | 520 | GUUGAUAA CUGAUGAG GCCGUUAGGC CGAA AUAGGGGC | 3029 |
| 2321 | CCCUAUCU U AUCAACAC | 521 | GUGUUGAU CUGAUGAG GCCGUUAGGC CGAA AGAUAGGG | 3030 |
| 2322 | CCUAUCUU A UCAACACU | 522 | AGUGUUGA CUGAUGAG GCCGUUAGGC CGAA AAGAUAGG | 3031 |
| 2324 | UAUCUUAU C AACACUUC | 523 | GAAGUGUU CUGAUGAG GCCGUUAGGC CGAA AUAAGAUA | 3032 |
| 2331 | UCAACACU U CCGGAAAC | 524 | GUUUCCGG CUGAUGAG GCCGUUAGGC CGAA AGUGUUGA | 3033 |
| 2332 | CAACACUU C CGGAAACU | 525 | AGUUUCCG CUGAUGAG GCCGUUAGGC CGAA AAGUGUUG | 3034 |
| 2341 | CGGAAACU A CUGUUGUU | 526 | AACAACAG CUGAUGAG GCCGUUAGGC CGAA AGUUUCCG | 3035 |
| 2346 | ACUACUGU U GUUAGACG | 527 | CGUCUAAC CUGAUGAG GCCGUUAGGC CGAA ACAGUAGU | 3036 |
| 2349 | ACUGUUGU U AGACGAAG | 528 | CUUCGUCU CUGAUGAG GCCGUUAGGC CGAA ACAACAGU | 3037 |
| 2350 | CUGUUGUU A GACGAAGA | 529 | UCUUCGUC CUGAUGAG GCCGUUAGGC CGAA AACAACAG | 3038 |
| 2366 | AGGCAGGU C CCCUAGAA | 530 | UUCUAGGG CUGAUGAG GCCGUUAGGC CGAA ACCUGCCU | 3039 |
| 2371 | GGUCCCCU A GAAGAAGA | 531 | UCUUCUUC CUGAUGAG GCCGUUAGGC CGAA AGGGGACC | 3040 |
| 2383 | GAAGAACU C CCUCGCCU | 532 | AGGCGAGG CUGAUGAG GCCGUUAGGC CGAA AGUUCUUC | 3041 |
| 2387 | AACUCCCU C GCCUCGCA | 533 | UGCGAGGC CUGAUGAG GCCGUUAGGC CGAA AGGGAGUU | 3042 |
| 2392 | CCUCGCCU C GCAGACGA | 534 | UCGUCUGC CUGAUGAG GCCGUUAGGC CGAA AGGCGAGG | 3043 |
| 2405 | ACGAAGGU C UCAAUCGC | 535 | GCGAUUGA CUGAUGAG GCCGUUAGGC CGAA ACCUUCGU | 3044 |
| 2407 | GAAGGUCU C AAUCGCCG | 536 | CGGCGAUU CUGAUGAG GCCGUUAGGC CGAA AGACCUUC | 3045 |
| 2411 | GUCUCAAU C GCCGCGUC | 537 | GACGCGGC CUGAUGAG GCCGUUAGGC CGAA AUUGAGAC | 3046 |
| 2419 | CGCCGCGU C GCAGAAGA | 538 | UCUUCUGC CUGAUGAG GCCGUUAGGC CGAA ACGCGGCG | 3047 |
| 2429 | CAGAAGAU C UCAAUCUC | 539 | GAGAUUGA CUGAUGAG GCCGUUAGGC CGAA AUCUUCUG | 3048 |
| 2431 | GAAGAUCU C AAUCUCGG | 540 | CCGAGAUU CUGAUGAG GCCGUUAGGC CGAA AGAUCUUC | 3049 |
| 2435 | AUCUCAAU C UCGGGAAU | 541 | AUUCCCGA CUGAUGAG GCCGUUAGGC CGAA AUUGAGAU | 3050 |
| 2437 | CUCAAUCU C GGGAAUCU | 542 | AGAUUCCC CUGAUGAG GCCGUUAGGC CGAA AGAUUGAG | 3051 |
| 2444 | UCGGGAAU C UCAAUGUU | 543 | AACAUUGA CUGAUGAG GCCGUUAGGC CGAA AUUCCCGA | 3052 |
| 2446 | GGGAAUCU C AAUGUUAG | 544 | CUAACAUU CUGAUGAG GCCGUUAGGC CGAA AGAUUCCC | 3053 |
| 2452 | CUCAAUGU U AGUAUUCC | 545 | GGAAUACU CUGAUGAG GCCGUUAGGC CGAA ACAUUGAG | 3054 |
| 2453 | UCAAUGUU A GUAUUCCU | 546 | AGGAAUAC CUGAUGAG GCCGUUAGGC CGAA AACAUUGA | 3055 |
| 2456 | AUGUUAGU A UUCCUUGG | 547 | CCAAGGAA CUGAUGAG GCCGUUAGGC CGAA ACUAACAU | 3056 |
| 2458 | GUUAGUAU U CCUUGGAC | 548 | GUCCAAGG CUGAUGAG GCCGUUAGGC CGAA AUACUAAC | 3057 |
| 2459 | UUAGUAUU C CUUGGACA | 549 | UGUCCAAG CUGAUGAG GCCGUUAGGC CGAA AAUACUAA | 3058 |
| 2462 | GUAUUCCU U GGACACAU | 550 | AUGUGUCC CUGAUGAG GCCGUUAGGC CGAA AGGAAUAC | 3059 |
| 2471 | GGACACAU A AGGUGGGA | 551 | UCCCACCU CUGAUGAG GCCGUUAGGC CGAA AUGUGUCC | 3060 |
| 2484 | GGGAAACU U UACGGGGC | 552 | GCCCCGUA CUGAUGAG GCCGUUAGGC CGAA AGUUUCCC | 3061 |
| 2485 | GGAAACUU U ACGGGGCU | 553 | AGCCCCGU CUGAUGAG GCCGUUAGGC CGAA AAGUUUCC | 3062 |
| 2486 | GAAACUUU A CGGGGCUU | 554 | AAGCCCCG CUGAUGAG GCCGUUAGGC CGAA AAAGUUUC | 3063 |
| 2494 | ACGGGGCU U UAUUCUUC | 555 | GAAGAAUA CUGAUGAG GCCGUUAGGC CGAA AGCCCCGU | 3064 |
| 2495 | CGGGGCUU U AUUCUUCU | 556 | AGAAGAAU CUGAUGAG GCCGUUAGGC CGAA AAGCCCCG | 3065 |
| 2496 | GGGGCUUU A UUCUUCUA | 557 | UAGAAGAA CUGAUGAG GCCGUUAGGC CGAA AAAGCCCC | 3066 |
| 2498 | GGCUUUAU U CUUCUACG | 558 | CGUAGAAG CUGAUGAG GCCGUUAGGC CGAA AUAAAGCC | 3067 |
| 2499 | GCUUUAUU C UUCUACGG | 559 | CCGUAGAA CUGAUGAG GCCGUUAGGC CGAA AAUAAAGC | 3068 |
| 2501 | UUUAUUCU U CUACGGUA | 560 | UACCGUAG CUGAUGAG GCCGUUAGGC CGAA AGAAUAAA | 3069 |
| 2502 | UUAUUCUU C UACGGUAC | 561 | GUACCGUA CUGAUGAG GCCGUUAGGC CGAA AAGAAUAA | 3070 |
| 2504 | AUUCUUCU A CGGUACCU | 562 | AGGUACCG CUGAUGAG GCCGUUAGGC CGAA AGAAGAAU | 3071 |
| 2509 | UCUACGGU A CCUUGCUU | 563 | AAGCAAGG CUGAUGAG GCCGUUAGGC CGAA ACCGUAGA | 3072 |
| 2513 | UGGUACCU U GCUUUAAU | 564 | AUUAAAGC CUGAUGAG GCCGUUAGGC CGAA AGGUACCG | 3073 |
| 2517 | ACCUUGCU U UAAUCCUA | 565 | UAGGAUUA CUGAUGAG GCCGUUAGGC CGAA AGCAAGGU | 3074 |
| 2518 | CCUUGCUU U AAUCCUAA | 566 | UUAGGAUU CUGAUGAG GCCGUUAGGC CGAA AAGCAAGG | 3075 |
| 2519 | CUUGCUUU A AUCCUAAA | 567 | UUUAGGAU CUGAUGAG GCCGUUAGGC CGAA AAAGCAAG | 3076 |
| 2522 | GCUUUAAU C CUAAAUGG | 568 | CCAUUUAG CUGAUGAG GCCGUUAGGC CGAA AUUAAAGC | 3077 |
| 2525 | UUAAUCCU A AAUGGCAA | 569 | UUGCCAUU CUGAUGAG GCCGUUAGGC CGAA AGGAUUAA | 3078 |
| 2537 | GGCAAACU C CUUCUUUU | 570 | AAAAGAAG CUGAUGAG GCCGUUAGGC CGAA AGUUUGCC | 3079 |
| 2540 | AAACUCCU U CUUUUCCU | 571 | AGGAAAAG CUGAUGAG GCCGUUAGGC CGAA AGGAGUUU | 3080 |
| 2541 | AACUCCUU C UUUUCCUG | 572 | CAGGAAAA CUGAUGAG GCCGUUAGGC CGAA AAGGAGUU | 3081 |
| 2543 | UUCCUUCU U UUCCUGAC | 573 | GUCAGGAA CUGAUGAG GCCGUUAGGC CGAA AGAAGGAG | 3082 |
| 2544 | UCCUUCUU U UCCUGACA | 574 | UGUCAGGA CUGAUGAG GCCGUUAGGC CGAA AAGAAGGA | 3083 |
| 2545 | CCUUCUUU U CCUGACAU | 575 | AUGUCAGG CUGAUGAG GCCGUUAGGC CGAA AAAGAAGG | 3084 |
| 2546 | CUUCUUUU C CUGACAUU | 576 | AAUGUCAG CUGAUGAG GCCGUUAGGC CGAA AAAAGAAG | 3085 |
| 2554 | CCUGACAU U CAUUUGCA | 577 | UGCAAAUG CUGAUGAG GCCGUUAGGC CGAA AUGUCAGG | 3086 |
| 2555 | CUGACAUU C AUUUGCAG | 578 | CUGCAAAU CUGAUGAG GCCGUUAGGC CGAA AAUGUCAG | 3087 |
| 2558 | ACAUUCAU U UGCAGGAG | 579 | CUCCUGCA CUGAUGAG GCCGUUAGGC CGAA AUGAAUGU | 3088 |
| 2559 | CAUUCAUU U GCAGGAGG | 580 | CCUCCUGC CUGAUGAG GCCGUUAGGC CGAA AAUGAAUG | 3089 |
| 2572 | GAGGACAU U GUUGAUAG | 581 | CUAUCAAC CUGAUGAG GCCGUUAGGC CGAA AUGUCCUC | 3090 |
| 2575 | GACAUUGU U GAUAGAUG | 582 | CAUCUAUC CUGAUGAG GCCGUUAGGC CGAA ACAAUGUC | 3091 |
| 2579 | UUGUUGAU A GAUGUAAG | 583 | UUUACAUC CUGAUGAG GCCGUUAGGC CGAA AUCAACAA | 3092 |
| 2585 | AUAGAUGU A AGCAAUUU | 584 | AAAUUGCU CUGAUGAG GCCGUUAGGC CGAA ACAUCUAU | 3093 |
| 2592 | UAAGCAAU U UGUGGGGC | 585 | GCCCCACA CUGAUGAG GCCGUUAGGC CGAA AUUGCUUA | 3094 |
| 2593 | AAGCAAUU U GUGGGGCC | 586 | GGCCCCAC CUGAUGAG GCCGUUAGGC CGAA AAUUGCUU | 3095 |
| 2605 | GGGCCCCU U ACAGUAAA | 587 | UUUACUGU CUGAUGAG GCCGUUAGGC CGAA AGGGGCCC | 3096 |
| 2606 | GGCCCCUU A CAGUAAAU | 588 | AUUUACUG CUGAUGAG GCCGUUAGGC CGAA AAGGGGCC | 3097 |
| 2611 | CUUACAGU A AAUGAAAA | 589 | UUUUCAUU CUGAUGAG GCCGUUAGGC CGAA ACUGUAAG | 3098 |
| 2629 | AGGAGACU U AAAUUAAC | 590 | GUUAAUUU CUGAUGAG GCCGUUAGGC CGAA AGUCUCCU | 3099 |
| 2630 | GGAGACUU A AAUUAACU | 591 | AGUUAAUU CUGAUGAG GCCGUUAGGC CGAA AAGUCUCC | 3100 |
| 2634 | ACUUAAAU U AACUAUGC | 592 | GCAUAGUU CUGAUGAG GCCGUUAGGC CGAA AUUUAAGU | 3101 |
| 2635 | CUUAAAUU A ACUAUGCC | 593 | GGCAUAGU CUGAUGAG GCCGUUAGGC CGAA AAUUUAAG | 3102 |
| 2639 | AAUUAACU A UGCCUGCU | 594 | AGCAGGCA CUGAUGAG GCCGUUAGGC CGAA AGUUAAUU | 3103 |
| 2648 | UGCCUGCU A GGUUUUAU | 595 | AUAAAACC CUGAUGAG GCCGUUAGGC CGAA AGCAGGCA | 3104 |
| 2652 | UGCUAGGU U UUAUCCCA | 596 | UGGGAUAA CUGAUGAG GCCGUUAGGC CGAA ACCUAGCA | 3105 |
| 2653 | GCUAGGUU U UAUCCCAA | 597 | UUGGGAUA CUGAUGAG GCCGUUAGGC CGAA AACCUAGC | 3106 |
| 2654 | CUAGGUUU U AUCCCAAU | 598 | AUUGGGAU CUGAUGAG GCCGUUAGGC CGAA AAACCUAG | 3107 |
| 2655 | UAGGUUUU A UCCCAAUG | 599 | CAUUGGGA CUGAUGAG GCCGUUAGGC CGAA AAAACCUA | 3108 |
| 2657 | GGUUUUAU C CCAAUGUU | 600 | AACAUUGG CUGAUGAG GCCGUUAGGC CGAA AUAAAACC | 3109 |
| 2665 | CCCAAUGU U ACUAAAUA | 601 | UAUUUAGU CUGAUGAG GCCGUUAGGC CGAA ACAUUGGG | 3110 |
| 2666 | CCAAUGUU A CUAAAUAU | 602 | AUAUUUAG CUGAUGAG GCCGUUAGGC CGAA AACAUUGG | 3111 |
| 2669 | AUGUUACU A AAUAUUUG | 603 | UAAAUAUU CUGAUGAG GCCGUUAGGC CGAA AGUAACAU | 3112 |
| 2673 | UACUAAAU A UUUGCCCU | 604 | AGGGCAAA CUGAUGAG GCCGUUAGGC CGAA AUUUAGUA | 3113 |
| 2675 | CUAAAUAU U UGCCCUUA | 605 | UAAGGGCA CUGAUGAG GCCGUUAGGC CGAA AUAUUUAG | 3114 |
| 2676 | UAAAUAUU U GCCCUUAG | 606 | CUAAGGGC CUGAUGAG GCCGUUAGGC CGAA AAUAUUUA | 3115 |
| 2682 | UUUGCCCU U AGAUAAAG | 607 | CUUUAUCU CUGAUGAG GCCGUUAGGC CGAA AGGGCAAA | 3116 |
| 2683 | UUGCCCUU A GAUAAAGG | 608 | CCUUUAUC CUGAUGAG GCCGUUAGGC CGAA AAGGGCAA | 3117 |
| 2687 | CCUUAGAU A AAGGGAUC | 609 | GAUCCCUU CUGAUGAG GCCGUUAGGC CGAA AUCUAAGG | 3118 |
| 2695 | AAAGGGAU C AAACCGUA | 610 | UACGGUUU CUGAUGAG GCCGUUAGGC CGAA AUCCCUUU | 3119 |
| 2703 | UAAACCGU A UUAUCCAG | 611 | CUGGAUAA CUGAUGAG GCCGUUAGGC CGAA ACGGUUUG | 3120 |
| 2705 | AACCGUAU U AUCCAGAG | 612 | CUCUGGAU CUGAUGAG GCCGUUAGGC CGAA AUACGGUU | 3121 |
| 2706 | ACCGUAUU A UCCAGAGU | 613 | ACUCUGGA CUGAUGAG GCCGUUAGGC CGAA AAUACGGU | 3122 |
| 2708 | CGUAUUAU C CAGAGUAU | 614 | AUACUCUG CUGAUGAG GCCGUUAGGC CGAA AUAAUACG | 3123 |
| 2715 | UCCAGAGU A UGUAGUUA | 615 | UAACUACA CUGAUGAG GCCGUUAGGC CGAA ACUCUGGA | 3124 |
| 2719 | GAGUAUGU A GUUAAUCA | 616 | UGAUUAAC CUGAUGAG GCCGUUAGGC CGAA ACAUACUC | 3125 |
| 2722 | UAUGUAGU U AAUCAUUA | 617 | UAAUGAUU CUGAUGAG GCCGUUAGGC CGAA ACUACAUA | 3126 |
| 2723 | AUGUAGUU A AUCAUUAC | 618 | GUAAUGAU CUGAUGAG GCCGUUAGGC CGAA AACUACAU | 3127 |
| 2726 | UAGUUAAU C AUUACUUC | 619 | GAAGUAAU CUGAUGAG GCCGUUAGGC CGAA AUUAACUA | 3128 |
| 2729 | UUAAUCAU U ACUUCCAG | 620 | CUGGAAGU CUGAUGAG GCCGUUAGGC CGAA AUGAUUAA | 3129 |
| 2730 | UAAUCAUU A CUUCCAGA | 621 | UCUGGAAG CUGAUGAG GCCGUUAGGC CGAA AAUGAUUA | 3130 |
| 2733 | UCAUUACU U CCAGACGC | 622 | GCGUCUGG CUGAUGAG GCCGUUAGGC CGAA AGUAAUGA | 3131 |
| 2734 | CAUUACUU C CAGACGCG | 623 | UGCGUCUG CUGAUGAG GCCGUUAGGC CGAA AAGUAAUG | 3132 |
| 2747 | CGCGACAU U AUUUACAC | 624 | GUGUAAAU CUGAUGAG GCCGUUAGGC CGAA AUGUCGCG | 3133 |
| 2748 | GCGACAUU A UUUACACA | 625 | UGUGUAAA CUGAUGAG GCCGUUAGGC CGAA AAUGUCGC | 3134 |
| 2750 | GACAUUAU U UACACACU | 626 | AGUGUGUA CUGAUGAG GCCGUUAGGC CGAA AUAAUGUC | 3135 |
| 2751 | ACAUUAUU U ACACACUC | 627 | GAGUGUGU CUGAUGAG GCCGUUAGGC CGAA AAUAAUGU | 3136 |
| 2752 | CAUUAUUU A CACACUCU | 628 | AGAGUGUG CUGAUGAG GCCGUUAGGC CGAA AAAUAAUG | 3137 |
| 2759 | UACACACU C UUUGGAAG | 629 | CUUCCAAA CUGAUGAG GCCGUUAGGC CGAA AGUGUGUA | 3138 |
| 2761 | CACACUCU U UGGAAGGC | 630 | GCCUUCCA CUGAUGAG GCCGUUAGGC CGAA AGAGUGUG | 3139 |
| 2762 | ACACUCUU U GGAAGGCG | 631 | CGCCUUCC CUGAUGAG GCCGUUAGGC CGAA AAGAGUGU | 3140 |
| 2776 | GCGGGGAU C UUAUAUAA | 632 | UUAUAUAA CUGAUGAG GCCGUUAGGC CGAA AUCCCCGC | 3141 |
| 2778 | GGGGAUCU U AUAUAAAA | 633 | UUUUAUAU CUGAUGAG GCCGUUAGGC CGAA AGAUCCCC | 3142 |
| 2779 | GGGAUCUU A UAUAAAAG | 634 | CUUUUAUA CUGAUGAG GCCGUUAGGC CGAA AAGAUCCC | 3143 |
| 2781 | GAUCUUAU A UAAAAGAG | 635 | CUCUUUUA CUGAUGAG GCCGUUAGGC CGAA AUAAGAUC | 3144 |
| 2783 | UCUUAUAU A AAAGAGAG | 636 | CUCUCUUU CUGAUGAG GCCGUUAGGC CGAA AUAUAAGA | 3145 |
| 2793 | AAGAGAGU C CACACGUA | 637 | UACGUGUG CUGAUGAG GCCGUUAGGC CGAA ACUCUCUU | 3146 |
| 2801 | CCACACGU A GCGCCUCA | 638 | UGAGGCGC CUGAUGAG GCCGUUAGGC CGAA ACGUGUGG | 3147 |
| 2808 | UAGCGCCU C AUUUUGCG | 639 | CGCAAAAU CUGAUGAG GCCGUUAGGC CGAA AGGCGCUA | 3148 |
| 2811 | CGCCUCAU U UUGCGGGU | 640 | ACCCGCAA CUGAUGAG GCCGUUAGGC CGAA AUGAGGCG | 3149 |
| 2812 | GCCUCAUU U UGCGGGUC | 641 | GACCCGCA CUGAUGAG GCCGUUAGGC CGAA AAUGAGGC | 3150 |
| 2813 | UCUCAUUU U GCGGGUCA | 642 | UGACCCGC CUGAUGAG GCCGUUAGGC CGAA AAAUGAGG | 3151 |
| 2820 | UUGCGGGU C ACCAUAUU | 643 | AAUAUGGU CUGAUGAG GCCGUUAGGC CGAA ACCCGCAA | 3152 |
| 2826 | GUCACCAU A UUCUUGGG | 644 | CCCAAGAA CUGAUGAG GCCGUUAGGC CGAA AUGGUGAC | 3153 |
| 2828 | CACCAUAU U CUUGGGAA | 645 | UUCCCAAG CUGAUGAG GCCGUUAGGC CGAA AUAUGGUG | 3154 |
| 2829 | ACCAUAUU C UUGGGAAC | 646 | GUUCCCAA CUGAUGAG GCCGUUAGGC CGAA AAUAUGGU | 3155 |
| 2831 | CAUAUUCU U GGGAACAA | 647 | UUGUUCCC CUGAUGAG GCCGUUAGGC CGAA AGAAUAUG | 3156 |
| 2843 | AACAAGAU C UACAGCAU | 648 | AUGCUGUA CUGAUGAG GCCGUUAGGC CGAA AUCUUGUU | 3157 |
| 2845 | CAAGAUCU A CAGCAUGG | 649 | CCAUGCUG CUGAUGAG GCCGUUAGGC CGAA AGAUCUUG | 3158 |
| 2859 | UGGGAGGU U GGUCUUCC | 650 | GGAAGACC CUGAUGAG GCCGUUAGGC CGAA ACCUCCCA | 3159 |
| 2863 | AGGUUGGU C UUCCAAAC | 651 | GUUUGGAA CUGAUGAG GCCGUUAGGC CGAA ACCAACCU | 3160 |
| 2865 | GUUGGUCU U CCAAACCU | 652 | AGGUUUGG CUGAUGAG GCCGUUAGGC CGAA AGACCAAC | 3161 |
| 2866 | UUGGUCUU C CAAACCUC | 653 | GAGGUUUG CUGAUGAG GCCGUUAGGC CGAA AAGACCAA | 3162 |
| 2874 | CCAAACCU C GAAAAGGC | 654 | GCCUUUUC CUGAUGAG GCCGUUAGGC CGAA AGGUUUGG | 3163 |
| 2895 | GGACAAAU C UUUCUGUC | 655 | GACAGAAA CUGAUGAG GCCGUUAGGC CGAA AUUUGUCC | 3164 |
| 2897 | ACAAAUCU U UCUGUCCC | 656 | GGGACAGA CUGAUGAG GCCGUUAGGC CGAA AGAUUUGU | 3165 |
| 2898 | CAAAUCUU U CUGUCCCC | 657 | GGGGACAG CUGAUGAG GCCGUUAGGC CGAA AAGAUUUG | 3166 |
| 2899 | AAAUCUUU C UGUCCCCA | 658 | UGGGGACA CUGAUGAG GCCGUUAGGC CGAA AAAGAUUU | 3167 |
| 2903 | UUUUCUGU C CCCAAUCC | 659 | GGAUUGGG CUGAUGAG GCCGUUAGGC CGAA ACAGAAAG | 3168 |
| 2910 | UCCCCAAU C CCCUGGGA | 660 | UCCCAGGG CUGAUGAG GCCGUUAGGC CGAA AUUGGGGA | 3169 |
| 2920 | CCUGGGAU U CUUCCCCG | 661 | CGGGGAAG CUGAUGAG GCCGUUAGGC CGAA AUCCCAGG | 3170 |
| 2921 | CUGGGAUU C UUCCCCGA | 662 | UCGGGGAA CUGAUGAG GCCGUUAGGC CGAA AAUCCCAG | 3171 |
| 2923 | GGGAUUCU U CCCCGAUC | 663 | GAUCGGGG CUGAUGAG GCCGUUAGGC CGAA AGAAUCCC | 3172 |
| 2924 | GGAUUCUU C CCCGAUCA | 664 | UGAUCGGG CUGAUGAG GCCGUUAGGC CGAA AAGAAUCC | 3173 |
| 2931 | UCCCCGAU C AUCAGUUG | 665 | CAACUGAU CUGAUGAG GCCGUUAGGC CGAA AUCGGGGA | 3174 |
| 2934 | CCGAUCAU C AGUUGGAC | 666 | GUCCAACU CUGAUGAG GCCGUUAGGC CGAA AUGAUCGG | 3175 |
| 2938 | UCAUCAGU U GGACCCUG | 667 | CAGGGUCC CUGAUGAG GCCGUUAGGC CGAA ACUGAUGA | 3176 |
| 2950 | CCCUGCAU U CAAAGCCA | 668 | UGGCUUUG CUGAUGAG GCCGUUAGGC CGAA AUGCAGGG | 3177 |
| 2951 | CCUGCAUU C AAAGCCAA | 669 | UUGGCUUU CUGAUGAG GCCGUUAGGC CGAA AAUGCAGG | 3178 |
| 2962 | AGCCAACU C AGUAAAUC | 670 | GAUUUACU CUGAUGAG GCCGUUAGGC CGAA AGUUGGCU | 3179 |
| 2966 | AACUCAGU A AAUCCAGA | 671 | UCUGGAUU CUGAUGAG GCCGUUAGGC CGAA ACUGAGUU | 3180 |
| 2970 | CAGUAAAU C CAGAUUGG | 672 | CCAAUCUG CUGAUGAG GCCGUUAGGC CGAA AUUUACUG | 3181 |
| 2976 | AUCCAGAU U GGGACCUC | 673 | GAGGUCCC CUGAUGAG GCCGUUAGGC CGAA AUCUGGAU | 3182 |
| 2984 | UGGGACCU C AACCCGCA | 674 | UGCGGGUU CUGAUGAG GCCGUUAGGC CGAA AGGUCCCA | 3183 |
| 3037 | GGGAGCAU U CGGGCCAG | 675 | CUGGCCCG CUGAUGAG GCCGUUAGGC CGAA AUGCUCCC | 3184 |
| 3038 | GGAGCAUU C GGGCCAGG | 676 | CCUGGCCC CUGAUGAG GCCGUUAGGC CGAA AAUGCUCC | 3185 |
| 3049 | GCCAGGGU U CACCCCUC | 677 | GAGGGGUG CUGAUGAG GCCGUUAGGC CGAA ACCCUGGC | 3186 |
| 3050 | CCAGGGUU C ACCCCUCC | 678 | GGAGGGGU CUGAUGAG GCCGUUAGGC CGAA AACCCUGG | 3187 |
| 3057 | UCACCCCU C CCCAUGGG | 679 | CCCAUGGG CUGAUGAG GCCGUUAGGC CGAA AGGGGUGA | 3188 |
| 3073 | GGGACUGU U GGGGUGGA | 680 | UCCACCCC CUGAUGAG GCCGUUAGGC CGAA ACAGUCCC | 3189 |
| 3087 | GGAGCCCU C ACGCUCAG | 681 | CUGAGCGU CUGAUGAG GCCGUUAGGC CGAA AGGGCUCC | 3190 |
| 3093 | UUCACGCU C AGGGCCUA | 682 | UAGGCCCU CUGAUGAG GCCGUUAGGC CGAA AGCGUGAG | 3191 |
| 3101 | CAGGGCCU A CUCACAAC | 683 | GUUGUGAG CUGAUGAG GCCGUUAGGC CGAA AGGCCCUG | 3192 |
| 3104 | GGCCUACU C ACAACUGU | 684 | ACAGUUGU CUGAUGAG GCCGUUAGGC CGAA AGUAGGCC | 3193 |
| 3123 | UAGCAGCU C CUCCUCCU | 685 | AGGAGGAG CUGAUGAG GCCGUUAGGC CGAA AGCUGCUG | 3194 |
| 3126 | CAGCUCCU C CUCCUGCC | 686 | GGCAGGAG CUGAUGAG GCCGUUAGGC CGAA AGGAGCUG | 3195 |
| 3129 | CUCCUCCU C CUGCCUCC | 687 | GGAGGCAG CUGAUGAG GCCGUUAGGC CGAA AGGAGGAG | 3196 |
| 3136 | UCCUGCCU C CACCAAUC | 688 | GAUUGGUG CUGAUGAG GCCGUUAGGC CGAA AGGCAGGA | 3197 |
| 3144 | CCACCAAU C GGCAGUCA | 689 | UGACUGCC CUGAUGAG GCCGUUAGGC CGAA AUUGGUGG | 3198 |
| 3151 | UCGGCAGU C AGGAAGGC | 690 | GCCUUCCU CUGAUGAG GCCGUUAGGC CGAA ACUGCCGA | 3199 |
| 3165 | GGCAGCCU A CUCCCUUA | 691 | UAAGGGAG CUGAUGAG GCCGUUAGGC CGAA AGGCUGCC | 3200 |
| 3168 | AGCCUACU C CCUUAUCU | 692 | AGAUAAGG CUGAUGAG GCCGUUAGGC CGAA AGUAGGCU | 3201 |
| 3172 | UACUCCCU U AUCUCCAC | 693 | GUGGAGAU CUGAUGAG GCCGUUAGGC CGAA AGGGAGUA | 3202 |
| 3173 | ACUCCCUU A UCUCCACC | 694 | GGUGGAGA CUGAUGAG GCCGUUAGGC CGAA AAGGGAGU | 3203 |
| 3175 | UCCCUUAU C UCCACCUC | 695 | GAGGUGGA CUGAUGAG GCCGUUAGGC CGAA AUAAGGGA | 3204 |
| 3177 | CCUUAUCU C CACCUCUA | 696 | UAGAGGUG CUGAUGAG GCCGUUAGGC CGAA AGAUAAGG | 3205 |
| 3183 | UUCCACCU C UAAGGGAC | 697 | GUCCCUUA CUGAUGAG GCCGUUAGGC CGAA AGGUGGAG | 3206 |
| 3185 | CCACCUCU A AUGGACAC | 698 | GUGUCCCU CUGAUGAG GCCGUUAGGC CGAA AGAGGUGG | 3207 |
| 3195 | GGGACACU C AUCCUCAG | 699 | CUGAGGAU CUGAUGAG GCCGUUAGGC CGAA AGUGUCCC | 3208 |
| 3198 | ACACUCAG C CUCAGGCC | 700 | GGCCUGAG CUGAUGAG GCCGUUAGGC CGAA AUGAGUGU | 3209 |
| 3201 | CUCAUCCU C AGGCCAUG | 701 | CAUGGCCU CUGAUGAG GCCGUUAGGC CGAA AGGAUGAG | 3210 |

Input Sequence = AF100308.
Cut Site = UH/.
Stem Length = 8.
Core Sequence = CUGAUGAG GCCGUUAGGC CGAA
AF100308 (Hepatitis B virus strain 2-18, 3215 bp)
Underlined region can be any X sequence or linker, as described herein.

[0249] TABLE VI
HUMAN HBV INOZYME AND SUBSTRATE SEQUENCE

| Pos | Substrate | Seq ID | Inozyme | Seq ID |
|---|---|---|---|---|
| 9 | AACUCCAC C ACUUUCCA | 702 | UGGAAAGU CUGAUGAG GCCGUUAGCC CGAA IUGGAGUU | 3211 |
| 10 | ACUCCACC A CUUUCCAC | 703 | GUGGAAAG CUGAUGAG GCCGUUAGGC CGAA IGUGGAGU | 3212 |
| 12 | UCCACCAC U UUCCACCA | 704 | UGGUGGAA CUGAUGAG GCCGUUAGGC CGAA IUGGUGGA | 3213 |
| 16 | CCACUUUC C ACCAAACU | 705 | AGUUUGGU CUGAUGAG GCCGUUAGGC CGAA IAAAGUGG | 3214 |
| 17 | CACUUUCC A CCAAACUC | 706 | GAGUUUGG CUGAUGAG GCCGUUAGGC CGAA IGAAAGUG | 3215 |
| 19 | CUUUCCAC C AAACUCUU | 707 | AAGAGUUU CUGAUGAC GCCGUUAGGC CGAA IUGGAAAG | 3216 |
| 20 | UUUCCACC A AACUCUUC | 708 | GAAGAGUU CUGAUGAG GCCGUUAGGC CGAA IGUGGAAA | 3217 |
| 24 | CACCAAAC U CUUCAAGA | 709 | UCUUGAAG CUGAUGAG GCCGUUAGGC CGAA IUUUGGUG | 3218 |
| 26 | CCAAACUC U UCAAGAUC | 710 | GAUCUUGA CUGAUGAG GCCGUUAGGC CGAA IAGUUUGG | 3219 |
| 29 | AACUCUUC A AGAUCCCA | 711 | UGGGAUCU CUGAUGAG GCCGUUAGGC CGAA IAAGAGUU | 3220 |
| 35 | UCAAGAUC C CAGAGUCA | 712 | UGACUCUG CUGAUGAG GCCGUUAGGC CGAA IAUCUUGA | 3221 |
| 36 | CAAGAUCC C AGAGUCAG | 713 | UUGACUCU CUGAUGAG GCCGUUAGGC CGAA IGAUCUUG | 3222 |
| 37 | AAGAUCCC A GAGUCAGG | 714 | CCUGACUC CUGAUGAG GCCGUUAGGC CGAA IGGAUCUU | 3223 |
| 43 | UCAGAGUC A GGGCCCUG | 715 | CAGGGCCC CUGAUGAG GCCGUUAGGC CGAA IACUCUGG | 3224 |
| 48 | GUCAGGGC C CUGUACUU | 716 | AAGUACAG CUGAUGAG GCCGUUAGGC CGAA ICCCUGAC | 3225 |
| 49 | UCAGGGCC C UGUACUUU | 717 | AAAGUACA CUGAUGAG GCCGUUAGGC CGAA IGCCCUGA | 3226 |
| 50 | CAGGGCCC U GUACUGUC | 718 | GAAAGUAC CUGAUGAG GCCGUUAGGC CGAA IGGCCCUG | 3227 |
| 55 | CCCUGUAC U UUCCUGCU | 719 | AGCAGGAA CUGAUGAG GCCGUUAGGC CGAA IUACAGGG | 3228 |
| 59 | GUACUUUC C UGCUGGUG | 720 | CACCAGCA CUGAUGAG GCCGUUAGGC CGAA IAAAGUAC | 3229 |
| 60 | UACUUUCC U GCUGGUGG | 721 | CCACCAGC CUGAUGAG GCCGUUAGGC CGAA IGAAAGUA | 3230 |
| 63 | UUUCCUGC U GGUGGCUC | 722 | GAGCCACC CUGAUGAG GCCGUUAGGC CGAA ICAGGAAA | 3231 |
| 70 | CUGGUGGC U CCAGUUCA | 723 | UGAACUGG CUGAUGAG GCCGUUAGGC CGAA ICCACCAG | 3232 |
| 72 | GGUGGCUC C AGUUCAGG | 724 | CCUGAACU CUGAUGAG GCCGUUAGGC CGAA IAGCCACC | 3233 |
| 73 | GUGGCUCC A GUUCAGGA | 725 | UCCUGAAC CUGAUGAG GCCGUUAGGC CGAA IGAGCCAC | 3234 |
| 78 | UCCAGUUC A GGAACAGU | 726 | ACUGUUCC CUGAUGAG GCCGUUAGGC CGAA IAACUGGA | 3235 |
| 84 | UCAGGAAC A GUGAGCCC | 727 | GGGCUCAC CUGAUGAG GCCGUUAGGC CGAA IUUCCUGA | 3236 |
| 91 | CAGUGAUC C CUGCUCAG | 728 | CUGAGCAG CUGAUGAG GCCGUUAGGC CGAA ICUCACUG | 3237 |
| 92 | AGUGAGCC C UGCUCAGA | 729 | UCUGAGCA CUGAUGAG GCCGUUAGGC CGAA IGCUCACU | 3238 |
| 93 | GUGAGCCC U GCUCAGAA | 730 | UUCUGAGC CUGAUGAG GCCGUUAGGC CGAA IGGCUCAC | 3239 |
| 96 | AGCCCUGC U CAGAAUAC | 731 | GUAUUCUG CUGAUGAG GCCGUUAGGC CGAA ICAGGGCU | 3240 |
| 98 | CCCUGCUC A GAAUACUG | 732 | CAGUAUUC CUGAUGAG GCCGUUAGGC CGAA IAGCAGGG | 3241 |
| 105 | CAGAAUAC U GUCUCUGC | 733 | GCAGAGAC CUGAUGAG GCCGUUAGGC CGAA IUAUUCUG | 3242 |
| 109 | AUACUGUC U CUGCCAUA | 734 | UAUGGCAG CUGAUGAG GCCGUUAGGC CGAA IACAGUAU | 3243 |
| 111 | ACUGUCUC U GCCAUAUC | 735 | GAUAUGGC CUGAUGAG GCCGUUAGGC CGAA IAGACAGU | 3244 |
| 114 | GUCUCUGC C AUAUCGUC | 736 | GACGAUAU CUGAUGAG GCCGUUAGGC CGAA ICAGAGAC | 3245 |
| 115 | UCUCUGCC A UAUCGUCA | 737 | UGACGAUA CUGAUGAG GCCGUUAGGC CGAA ICCAGAGA | 3246 |
| 123 | AUAUCGUC A AUCUUAUC | 738 | GAUAAGAU CUGAUGAG GCCGUUAGGC CGAA IACGAUAU | 3247 |
| 127 | CGUCAAUC U UAUCGAAG | 739 | CUUCGAUA CUGAUGAG GCCGUUAGGC CGAA IAUUGACG | 3248 |
| 138 | UCGAAGAC U GGGGACCC | 740 | GGGUCCCC CUGAUGAG GCCGUUAGGC CGAA TUCUUCGA | 3249 |
| 145 | CUGGGGAC C CUGUACCG | 741 | CGGUACAG CUGAUGAG GCCGUUAGGC CGAA IUCCCCAG | 3250 |
| 146 | UGGGGACC C UGUACCGA | 742 | UCGGUACA CUGAUGAG GCCGUUAGGC CGAA IGUCCCCA | 3251 |
| 147 | GGGGACCC U GUACCGAA | 743 | UUCGGUAC CUGAUGAG GCCGUUAGGC CGAA IGGUCCCC | 3252 |
| 152 | CCCUGUAC C GAACAUGG | 744 | CCAUGUUC CUGAUGAG GCCGUUAGGC CGAA IUACAGGG | 3253 |
| 157 | UACCGAAC A UGGAGAAC | 745 | GUUCUCCA CUGAUGAG GCCGUUAGGC CGAA IUUCGGUA | 3254 |
| 166 | UGGAGAAC A UCOCAUCA | 746 | UGAUGCGA CUGAUGAG GCCGUUAGGC CGAA IUUCUCCA | 3255 |
| 171 | AACAUCGC A UCAGGACU | 747 | AGUCCUGA CUGAUGAG GCCGUUAGGC CGAA ICGAUGUU | 3256 |
| 174 | AUCGCAUC A GGACUCCU | 748 | AGGAGUCC CUGAUGAG GCCGUUAGGC CGAA IAUGCGAU | 3257 |
| 179 | AUCAGGAC U CCUAGGAC | 749 | GUCCUAGG CUGAUGAG GCCGUUAGGC CGAA IUCCUGAU | 3258 |
| 181 | CAGGACUC C UAGGACCC | 750 | GGGUCCUA CUGAUGAG GCCGUUAGGC CGAA IAGUCCUG | 3259 |
| 182 | AGGACUCC U AGGACCCC | 751 | GGGGUCCU CUGAUGAG GCCGUUAGGC CGAA IGAGUCCU | 3260 |
| 188 | CCUAGGAC C CCUGCUCG | 752 | CGAGCAGG CUGAUGAG GCCGUUAGGC CGAA IUCCUAGG | 3261 |
| 189 | CUAGGACC C CUGCUCGU | 753 | ACGAGCAG CUGAUGAG GCCGUUAGGC CGAA IGUCCUAG | 3262 |
| 190 | UAGGACCC C UGCUCGUG | 754 | CACGAGCA CUGAUGAG GCCGUUAGGC CGAA IGGUCCUA | 3263 |
| 191 | AGGACCCC U GCUCGUGU | 755 | ACACGAGC CUGAUGAG GCCGUUAGGC CGAA IGGGUCCU | 3264 |
| 194 | ACCCCUGC U CGUGUUAC | 756 | GUAACACG CUGAUGAG GCCGUUAGGC CGAA ICAGGGGU | 3265 |
| 203 | CGUGUUAC A GGCGGGGU | 757 | ACCCCGCC CUGAUGAG GCCGUUAGGC CGAA IUAACACG | 3266 |
| 217 | GGUUUUUC U UGUUGACA | 758 | UGUCAACA CUGAUGAG GCCGUUAGGC CGAA IAAAAACC | 3267 |
| 225 | UUGUUGAC A AAAAUCCU | 759 | AGGAUUUU CUGAUGAG GCCGUUAGGC CGAA IUCAACAA | 3268 |
| 232 | CAAAAAUC C UCACAAUA | 760 | UAUUGUGA CUGAUGAG GCCGUUAGGC CGAA IAUUUUUG | 3269 |
| 233 | AAAAAUCC U CACAAUAC | 761 | GUAUUGUG CUGAUGAG GCCGUUAGGC CGAA IGAUUUUU | 3270 |
| 235 | AAAUCCUC A CAAUACCA | 762 | UGGUAUUG CUGAUGAG GCCGUUAGGC CGAA IAGGAUUU | 3271 |
| 237 | AUCCUCAC A AUACCACA | 763 | UGUGGUAU CUGAUGAG GCCGUUAGGC CGAA IUGAGGAU | 3272 |
| 242 | CACAAUAC C ACAGAGUC | 764 | GACUCUGU CUGAUGAG GCCGUUAGGC CGAA IUAUUGUG | 3273 |
| 243 | ACAAUACC A CAGAGUCU | 765 | AGACUCUG CUGAUGAG GCCGUUAGGC CGAA IGUAUUGU | 3274 |
| 245 | AAUACCAC A GAGUCUAG | 766 | CUAGACUC CUGAUGAG GCCGUUAGGC CGAA IUGGUAUU | 3275 |
| 251 | ACAGAGUC U AGACUCGU | 767 | ACGAGUCU CUGAUGAG GCCGUUAGGC CGAA IACUCUGU | 3276 |
| 256 | GUCUAGAC U CGUGGUGG | 768 | CCACCACG CUGAUGAG GCCGUUAGGC CGAA IUCUAGAC | 3277 |
| 267 | UGGUGGAC U UCUCUCAA | 769 | UUGAGAGA CUGAUGAG GCCGUUAGGC CGAA IUCCACCA | 3278 |
| 270 | UGGACUUC U CUCAAUUU | 770 | AAAUUGAG CUGAUGAG GCCGUUAGGC CGAA IAAGUCCA | 3279 |
| 272 | GACUUCUC U CAAUUUUC | 771 | GAAAAUUG CUGAUGAG GCCGUUAGGC CGAA IAGAAGUC | 3280 |
| 274 | CUUCUCUC A AUUUUCUA | 772 | UAGAAAAU CUGAUGAG GCCGUUAGGC CGAA IAGAGAAG | 3281 |
| 281 | CAAUUUUC U AGGGGGAA | 773 | UUCCCCCU CUGAUGAG GCCGUUAGGC CGAA IAAAAUUG | 3282 |
| 291 | GGGGGAAC A CCCGUGUG | 774 | CACACGGG CUGAUGAG GCCGUUAGGC CGAA IUUCCCCC | 3283 |
| 293 | GGGAACAC C CGUGUGUC | 775 | GACACACG CUGAUGAG GCCGUUAGGC CGAA IUGUUCCC | 3284 |
| 294 | GGAACACC C GUGUGUCU | 776 | AGACACAC CUGAUGAG GCCGUUAGGC CGAA IGUGUUCC | 3285 |
| 302 | CGUGUGUC U UGGCCAAA | 777 | UUUGGCCA CUGAUGAG GCCGUUAGGC CGAA IACACACG | 3286 |
| 307 | GUCUUGGC C AAAAUUCG | 778 | CGAAUUUU CUGAUGAG GCCGUUAGGC CGAA ICCAAGAC | 3287 |
| 308 | UCUUGGCC A AAAUUCGC | 779 | GCGAAUUU CUGAUGAG GCCGUUAGGC CGAA IGCCAAGA | 3288 |
| 317 | AAAUUCGC A GUCCCAAA | 780 | UUUGGGAC CUGAUGAG GCCGUUAGGC CGAA ICGAAUUU | 3289 |
| 321 | UCGCAGUC C CAAAUCUC | 781 | GAGAUUUG CUGAUGAG GCCGUUAGGC CGAA IACUGCGA | 3290 |
| 322 | CGCAGUCC C AAAUCUCC | 782 | GGAGAUUU CUGAUGAG GCCGUUAGGC CGAA IGACUGCG | 3291 |
| 323 | GCAGUCCC A AAUCUCCA | 783 | UGGAGAUU CUGAUGAG GCCGUUAGGC CGAA IGGACUGC | 3292 |
| 328 | CCCAAAUC U CCAGUCAC | 784 | GUGACUGG CUGAUGAG GCCGUUAGGC CGAA IAUUUGGG | 3293 |
| 330 | CAAAUCUC C AGUCACUC | 785 | GAGUGACU CUGAUGAG GCCGUUAGGC CGAA IAGAUUUG | 3294 |
| 331 | AAAUCUCC A GUCACUCA | 786 | UGAGUGAC CUGAUGAG GCCGUUAGGC CGAA IGAGAUUU | 3295 |
| 335 | CUCCAGUC A CUCACCAA | 787 | UUGGUGAG CUGAUGAG GCCGUUAGGC CGAA IACUGGAG | 3296 |
| 337 | CCAGUCAC U CACCAACC | 788 | GGUUGGUG CUGAUGAG GCCGUUAGGC CGAA IUGACUGG | 3297 |
| 339 | AGUCACUC A CCAACCUG | 789 | CAGGUUGG CUGAUGAG GCCGUUAGGC CGAA IAGUGACU | 3298 |
| 341 | UCACUCAC C AACCUGUU | 790 | AACAGGUU CUGAUGAG GCCGUUAGGC CGAA IUGAGUGA | 3299 |
| 342 | CACUCACC A ACCUGUUG | 791 | CAACAGGU CUGAUGAG GCCGUUAGGC CGAA IGUGAGUG | 3300 |
| 345 | UCACCAAC C UGUUGUCC | 792 | GGACAACA CUGAUGAG GCCGUUAGGC CGAA IUUGGUGA | 3301 |
| 346 | CACCAACC U GUUGUCCU | 793 | AGGACAAC CUGAUGAG GCCGUUAGGC CGAA IGUUGGUG | 3302 |
| 353 | CUGUUGUC C UCCAAUUU | 794 | AAAUUGGA CUGAUGAG GCCGUUAGGC CGAA IACAACAG | 3303 |
| 354 | UGUUGUCC U CCAAUUUG | 795 | CAAAUUGG CUGAUGAG GCCGUUAGGC CGAA IGACAACA | 3304 |
| 356 | UUGUCCUC C AAUUUGUC | 796 | GACAAAUU CUGAUGAG GCCGUUAGGC CGAA IAGGACAA | 3305 |
| 357 | UGUCCUCC A AUUUGUCC | 797 | GGACAAAU CUGAUGAG GCCGUUAGGC CGAA IGAGGACA | 3306 |
| 365 | AAUUUGUC C UGGUUAUC | 798 | GAUAACCA CUGAUGAG GCCGUUAGGC CGAA IACAAAUU | 3307 |
| 366 | AUUUGUCC U GGUUAUCG | 799 | CGAUAACC CUGAUGAG GCCGUUAGGC CGAA IGACAAAU | 3308 |
| 376 | GUUAUCGC U GGAUGUGU | 800 | ACACAUCC CUGAUGAG GCCGUUAGGC CGAA ICGAUAAC | 3309 |
| 386 | GAUGUGUC U GCGGCGUU | 801 | AACGCCGC CUGAUGAG GCCGUUAGGC CGAA IACACAUC | 3310 |
| 400 | GUUUUAUC A UCUUCCUC | 802 | GAGGAAGA CUGAUGAG GCCGUUAGGC CGAA IAUAAAAC | 3311 |
| 403 | UUAUCAUC U UCCUCUGC | 803 | GCAGAGGA CUGAUGAG GCCGUUAGGC CGAA IAUGAUAA | 3312 |
| 406 | UCAUCUUC C UCUGCAUC | 804 | GAUGCAGA CUGAUGAG GCCGUUAGGC CGAA IAAGAUGA | 3313 |
| 407 | CAUCUUCC U CUGCAUCC | 805 | GGAUGCAG CUGAUGAG GCCGUUAGGC CGAA IGAAGAUG | 3314 |
| 409 | UCUUCCUC U GCAUCCUG | 806 | CAGGAUGC CUGAUGAG GCCGUUAGGC CGAA IAGGAAGA | 3315 |
| 412 | UCCUCUGC A UCCUGCUG | 807 | CACCAGGA CUGAUGAG GCCGUUAGGC CGAA ICAGAGGA | 3316 |
| 415 | UCUCCAUC C UGCUGCUA | 808 | UAGCAGCA CUGAUGAG GCCGUUAGGC CGAA IAUGCAGA | 3317 |
| 416 | CUGCAUCC U GCUGCUAU | 809 | AUAGCAGC CUGAUGAG GCCGUUAGGC CGAA IGAUGCAG | 3318 |
| 419 | CAUCCUGC U GCUAUGCC | 810 | GGCAUAGC CUGAUGAG GCCGUUAGGC CGAA ICAGGAUG | 3319 |
| 422 | CCUGCUGC U AUGCCUCA | 811 | UGAGCCAU CUGAUGAG GCCGUUAGGC CGAA ICAGCAGG | 3320 |
| 427 | UGCUAUGC C UCAUCUUC | 812 | GAAGAUGA CUGAUGAG GCCGUUAGGC CGAA ICAUAGCA | 3321 |
| 428 | GCUAUGCC U CAUCUUCU | 813 | AGAAGAUG CUGAUGAG GCCGUUAGGC CGAA IGCAUAGC | 3322 |
| 430 | UAUGCCUC A UCUUCUUG | 814 | CAAGAAGA CUGAUGAG GCCGUUAGGC CGAA IACGCAUA | 3323 |
| 433 | GCCUCAUC U UCUUGUUG | 815 | CAACAAGA CUGAUGAG GCCGUUAGGC CGAA IAUGAGGC | 3324 |
| 436 | UCAUCUUC U UGUUGGUU | 816 | AACCAACA CUGAUGAG GCCGUUAGGC CGAA IAAGAUGA | 3325 |
| 446 | GUUGGUUC U UCUGGACU | 817 | AGUCCAGA CUGAUGAG GCCGUUAGGC CGAA IAACCAAC | 3326 |
| 449 | GGUUCUUC U GGACUAUC | 818 | GAUAGUCC CUGAUGAG GCCGUUAGGC CGAA IAAGAACC | 3327 |
| 454 | UUCUGGAC U AUCAAGGU | 819 | ACCUUGAU CUGAUGAG GCCGUUAGGC CGAA IUCCAGAA | 3328 |
| 458 | GGACUAUC A AGGUAUGU | 820 | ACAUACCU CUGAUGAG GCCGUUAGGC CGAA IAUAGUCC | 3329 |
| 470 | UAUGUUGC C CGUUUGUC | 821 | GACAAACG CUGAUGAG GCCGUUAGGC CGAA ICAACAUA | 3330 |
| 471 | AUGUUGCC C GUUUGUCC | 822 | GGACAAAC CUGAUGAG GCCGUUAGGC CGAA IGCAACAU | 3331 |
| 479 | CGUUUGUC C UCUAAUUC | 823 | GAAUUAGA CUGAUGAG GCCGUUAGGC CGAA IACAAACG | 3332 |
| 480 | GUUUGUCC U CUAAUUCC | 824 | GGAAUUAG CUGAUGAG GCCGUUAGGC CGAA IGACAAAC | 3333 |
| 482 | UUGUCCUC U AAUUCCAG | 825 | CUGGAAUU CUGAUGAG GCCGUUAGGC CGAA IAGGACAA | 3334 |
| 488 | UCUAAUUC C AGGAUCAU | 826 | AUGAUCCU CUGAUGAG GCCGUUAGGC CGAA IAAUUAGA | 3335 |
| 489 | CUAAUUCC A GGAUCAUC | 827 | GAUGAUCC CUGAUGAG GCCGUUAGGC CGAA IGAAUUAG | 3336 |
| 495 | CCAGGAUC A UCAACAAC | 828 | GUUGUUGA CUGAUGAG GCCGUUAGGC CGAA IAUCCUGG | 3337 |
| 498 | GGAUCAUC A ACAACCAG | 829 | CUGGUUGU CUGAUGAG GCCGUUAGGC CGAA IAUGAUCC | 3338 |
| 501 | UCAUCAAC A ACCAGCAC | 830 | GUGCUGGU CUGAUGAG GCCGUUAGGC CGAA IUUGAUGA | 3339 |
| 504 | UCAACAAC C AGCACCGG | 831 | CCGGUGCU CUGAUGAG GCCGUUAGGC CGAA IUUGUUGA | 3340 |
| 505 | CAACAACC A GCACCGGA | 832 | UCCGGUGC CUGAUGAG GCCGUUAGGC CGAA IGUUGUUG | 3341 |
| 508 | CAACCAGC A CCGGACCA | 833 | UGGUCCGG CUGAUGAG GCCGUUAGGC CGAA ICUGGUUG | 3342 |
| 510 | ACCAGCAC C GGACCAUG | 834 | CAUGGUCC CUGAUGAG GCCGUUAGGC CGAA IUGCUGGU | 3343 |
| 515 | CACCGGAC C AUGCAAAA | 835 | UUUUGCAU CUGAUGAG GCCGUUAGGC CGAA IUCCGGUG | 3344 |
| 516 | ACCGGACC A UGCAAAAC | 836 | GUUUUGCA CUGAUGAG GCCGUUAGGC CGAA IGUCCGGU | 3345 |
| 520 | GACCAUGC A AAACCUGC | 837 | GCAGGUUU CUGAUGAG GCCGUUAGGC CGAA ICAUGGUC | 3346 |
| 525 | UGCAAAAC C UGCACAAC | 838 | GUUGUGCA CUGAUGAG GCCGUUAGGC CGAA IUUUUGCA | 3347 |
| 526 | GCAAAACC U GCACAACU | 839 | AGUUGUGC CUGAUGAG GCCGUUAGGC CGAA IGUUUUGC | 3348 |
| 529 | AAACCUGC A CAACUCCU | 840 | AGGAGUUG CUGAUGAG GCCGUUAGGC CGAA ICAGGUUU | 3349 |
| 531 | ACCUGCAC A ACUCCUGC | 841 | GCAGGAGU CUGAUGAG GCCGUUAGGC CGAA IUGCAGGU | 3350 |
| 534 | UGCACAAC U CCUGCUCA | 842 | UGAGCAGG CUGAUGAG GCCGUUAGGC CGAA IUUGUGCA | 3351 |
| 536 | CACAACUC C UGCUCAAG | 843 | UUUGAGCA CUGAUGAG GCCGUUAGGC CGAA IAGUUGUG | 3352 |
| 537 | ACAACUCC U GCUCAAGG | 844 | CCUUGAGC CUGAUGAG GCCGUUAGGC CGAA IGAGUUGU | 3353 |
| 540 | ACUCCUGC U CAAGGAAC | 845 | GUUCCUUG CUGAUGAG GCCGUUAGGC CGAA ICAGGAGU | 3354 |
| 542 | UCCUGCUC A AGGAACCU | 846 | AGGUUCCU CUGAUGAG GCCGUUAGGC CGAA IAGCAGGA | 3355 |
| 549 | CAAGGAAC C UCUAUGUU | 847 | AACAUAGA CUGAUGAG GCCGUUAGGC CGAA IUUCCUUG | 3356 |
| 550 | AAGGAACC U CUAUGUUU | 848 | AAACAUAG CUGAUGAG GCCGUUAGGC CGAA IGUUCCUU | 3357 |
| 552 | GGAACCUC U AUGUUUCC | 849 | GGAAACAU CUGAUGAG GCCGUUAGGC CGAA IAGGUUCC | 3358 |
| 560 | UAUGUUUC C CUCAUGUU | 850 | AACAUGAG CUGAUGAG GCCGUUAGGC CGAA IAAACAUA | 3359 |
| 561 | AUGUUUCC C UCAUGUUG | 851 | CAACAUGA CUGAUGAG GCCGUUAGGC CGAA IGAAACAU | 3360 |
| 562 | UGUUUCCC U CAUGUUGC | 852 | GCAACAUG CUGAUGAG GCCGUUAGGC CGAA IGGAAACA | 3361 |
| 564 | UUUCCCUC A UGUUGCUG | 853 | UAGCAACA CUGAUGAG GCCGUUAGGC CGAA IAGGGAAA | 3362 |
| 571 | CAUGUUGC U GUACAAAA | 854 | UUUUGUAC CUGAUGAG GCCGUUAGGC CGAA ICAACAUG | 3363 |
| 576 | UGCUGUAC A AAACCUAC | 855 | GUAGGUUU CUGAUGAG GCCGUUAGGC CGAA IUACAGCA | 3364 |
| 581 | UACAAAAC C UACGGACG | 856 | CGUCCGUA CUGAUGAG GCCGUUAGGC CGAA IUUUUGUA | 3365 |
| 582 | ACAAAACC U ACGGACGG | 857 | CCGUCCGU CUGAUGAG GCCGUUAGGC CGAA IGUUUUGU | 3366 |
| 595 | ACGGAAAC U GCACCUGU | 858 | ACAGGUGC CUGAUGAG GCCGUUAGGC CGAA IUUUCCGU | 3367 |
| 598 | GAAACUGC A CCUGUAUU | 859 | AAUACAGG CUGAUGAG GCCGUUAGGC CGAA ICAGUUUC | 3368 |
| 600 | AACUGCAC C UGUAUUCC | 860 | GGAAUACA CUGAUGAG GCCGUUAGGC CGAA IUGCAGUU | 3369 |
| 601 | ACUGCACC U GUAUUCCC | 861 | GGGAAUAC CUGAUGAG GCCGUUAGGC CGAA IGUGCAGU | 3370 |
| 608 | CUGUAUUC C CAUCCCAU | 862 | AUGGGAUG CUGAUGAG GCCGUUAGGC CGAA IAAUACAG | 3371 |
| 609 | UGUAUUCC C AUCCCAUC | 863 | GAUGGGAU CUGAUGAG GCCGUUAGGC CGAA IGAAUACA | 3372 |
| 610 | GUAUUCCC A UCCCAUCA | 864 | UGAUGGGA CUGAUGAG GCCGUUAGGC CGAA IGGAAUAC | 3373 |
| 613 | UUCCCAUC C CAUCAUCU | 865 | AGAUGAUG CUGAUGAG GCCGUUAGGC CGAA IAUGGGAA | 3374 |
| 614 | UCCCAUCC C AUCAUCUU | 866 | AAGAUGAU CUGAUGAG GCCGUUAGGC CGAA IGAUGUGA | 3375 |
| 615 | CCCAUCCC A UCAUCUUG | 867 | CAAGAUGA CUGAUGAG GCCGUUAGGC CGAA IGGAUGGG | 3376 |
| 618 | AUCCCAUC A UCUUGGGC | 868 | GCCCAAGA CUGAUGAG GCCGUUAGGC CGAA IAUGGGAU | 3377 |
| 621 | CCAUCAUC U UGGGCUUU | 869 | AAAGCCCA CUGAUGAG GCCGUUAGGC CGAA IAUGAUGG | 3378 |
| 627 | UCUUGGGC U UUCGCAAA | 870 | UUUGCGAA CUGAUGAG GCCGUUAGGC CGAA ICCCAAGA | 3379 |
| 633 | GCUUUCGC A AAAUACCU | 871 | AGGUAUUU CUGAUGAG GCCGUUAGGC CGAA ICGAAAGC | 3380 |
| 640 | CAAAAUAC C UAUGGGAG | 872 | CUCCCAUA CUGAUGAG GCCGUUAGGC CGAA IUAUUUUG | 3381 |
| 641 | AAAAUACC U AUGGGAGU | 873 | ACUCCCAU CUGAUGAG GCCGUUAGGC CGAA IGUAUUUU | 3382 |
| 654 | GAGUGGGC C UCAGUCCG | 874 | CGGACUGA CUGAUGAG GCCGUUAGGC CGAA ICCCACUC | 3383 |
| 655 | AGUGGGCC U CAGUCCGU | 875 | ACGGACUG CUGAUGAG GCCGUUAGGC CGAA IGCCCACU | 3384 |
| 657 | UGGGCCUC A GUCCGUUU | 876 | AAACGGAC CUGAUGAG GCCGUUAGGC CGAA IAGGCCCA | 3385 |
| 661 | CCUCAGUC C GUUUCUCU | 877 | AGAGAAAC CUGAUGAG GCCGUUAGGC CGAA IACUGAGG | 3386 |
| 667 | UCCGUUUC U CUUGGCUC | 878 | GAGCCAAG CUGAUGAG GCCGUUAGGC CGAA IAAACGGA | 3387 |
| 669 | CGUUUCUC U UGGCUCAG | 879 | CUGAGCCA CUGAUGAG GCCGUUAGGC CGAA IAGAAACG | 3388 |
| 674 | CUCUUGGC U CAGUUUAC | 880 | GUAAACUG CUGAUGAG GCCGUUAGGC CGAA ICCAAGAG | 3389 |
| 676 | CUUGGCUC A GUUUACUA | 881 | UAGUAAAC CUGAUGAG GCCGUUAGGC CGAA IAGCCAAG | 3390 |
| 683 | UAGUUUAC U AGUGCCAU | 882 | AUGGCACU CUGAUGAG GCCGUUAGGC CGAA IUAAACUG | 3391 |
| 689 | ACUAGUGC C AUUUGUUC | 883 | GAACAAAU CUGAUGAG GCCGUUAGGC CGAA ICACUAGU | 3392 |
| 690 | CUAGUGCC A UUUGUUCA | 884 | UGAACAAA CUGAUGAG GCCGUUAGGC CGAA IGCACUAG | 3393 |
| 698 | AUUUGUUC A GUGGUUCG | 885 | CGAACCAC CUGAUGAG GCCGUUAGGC CGAA IAACAAAU | 3394 |
| 713 | UGUAGGGC U UUCCCCCA | 886 | UGGGGGAA CUGAUGAG GCCGUUAGGC CGAA ICCCUACG | 3395 |
| 717 | GGGCUUUC C CCCACUGU | 887 | ACAGUGGG CUGAUGAG GCCGUUAGGC CGAA IAAAGCCC | 3396 |
| 718 | GGCUUUCC C CCACUGUC | 888 | GACAGUGG CUGAUGAG GCCGUUAGGC CGAA IGAAAGCC | 3397 |
| 719 | GCUUUCCC C CACUGUCU | 889 | AGACAGUG CUGAUGAG GCCGUUAGGC CGAA IGGAAAGC | 3398 |
| 720 | CUUUCCCC C ACUGUCUG | 890 | CAGACAGU CUGAUGAG GCCGUUAGGC CGAA IGGGAAAG | 3399 |
| 721 | UUUCCCCC A CUGUCUGG | 891 | CCAGACAG CUGAUGAG GCCGUUAGGC CGAA IGGGGAAA | 3400 |
| 723 | UCCCCCAC U GUCUGGCU | 892 | AGCCAGAC CUGAUGAG GCCGUUAGGC CGAA IUGGGGGA | 3401 |
| 727 | CCACUGUC U GGCUUUCA | 893 | UGAAAGCC CUGAUGAG GCCGUUAGGC CGAA IACAGUGG | 3402 |
| 731 | UGUCUGGC U UUCAGUUA | 894 | UAACUGAA CUGAUGAG GCCGUUAGGC CGAA ICCAGACA | 3403 |
| 735 | UGGCUUUC A GUUAUAUG | 895 | CAUAUAAC CUGAUGAG GCCGUUAGGC CGAA IAAAGCCA | 3404 |
| 764 | UUGGGGGC C AAGUCUGU | 896 | ACAGACUU CUGAUGAG GCCGUUAGGC CGAA ICCCCCAA | 3405 |
| 765 | UGGGGGCC A AGUCUGUA | 897 | UACAGACU CUGAUGAG GCCGUUAGGC CGAA IGCCCCCA | 3406 |
| 770 | GCCAAGUC U GUACAACA | 898 | UGUUGUAC CUGAUGAG GCCGUUAGGC CGAA IACUUGGC | 3407 |
| 775 | GUCUGUAC A ACAUCUUG | 899 | CAAGAUGU CUGAUGAG GCCGUUAGGC CGAA IUACAGAC | 3408 |
| 778 | UGUACAAC A UCUUGAGU | 900 | ACUCAAGA CUGAUGAG GCCGUUAGGC CGAA IUUGUACA | 3409 |
| 781 | ACAACAUC U UGAGUCCC | 901 | GGGACUCA CUGAUGAG GCCGUUAGGC CGAA IAUGUUGU | 3410 |
| 788 | CUUGAGUC C CUUUAUGC | 902 | GCAUAAAG CUGAUGAG GCCGUUAGGC CGAA IACUCAAG | 3411 |
| 789 | UUGAGUCC C UUUAUGCC | 903 | GGCAUAAA CUGAUGAG GCCGUUAGGC CGAA IGACUCAA | 3412 |
| 790 | UGAGUCCC U UUAUGCCG | 904 | CGGCAUAA CUGAUGAG GCCGUUAGGC CGAA IGGACUCA | 3413 |
| 797 | CUUUAUGC C GCUGUUAC | 905 | GUAACAGC CUGAUGAG GCCGUUAGGC CGAA ICAUAAAG | 3414 |
| 800 | UAUGCCGC U GUUACCAA | 906 | UUGGUAAC CUGAUGAG GCCGUUAGGC CGAA ICGGCAUA | 3415 |
| 806 | GCUGUUAC C AAUUUUCU | 907 | AGAAAAUU CUGAUGAG GCCGUUAGGC CGAA IUAACAGC | 3416 |
| 807 | CUGUUACC A AUUUUCUU | 908 | AAGAAAAU CUGAUGAG GCCGUUAGGC CGAA IGUAACAG | 3417 |
| 814 | CAAUUUUC U UUUGUCUU | 909 | AAGACAAA CUGAUGAG GCCGUUAGGC CGAA IAAAAUUG | 3418 |
| 821 | CUUUUGUC U UUGGGUAU | 910 | AUACCCAA CUGAUGAG GCCGUUAGGC CGAA IACAAAAG | 3419 |
| 832 | GGGUAUAC A UUUAAACC | 911 | GGUUUAAA CUGAUGAG GCCGUUAGGC CGAA IUAUACCC | 3420 |
| 840 | AUUUAAAC C CUCACAAA | 912 | GUGGUGAG CUGAUGAG GCCGUUAGGC CGAA IUUUAAAU | 3421 |
| 841 | UUUAAACC C UCACAAAA | 913 | UUUUGUGA CUGAUGAG GCCGUUAGGC CGAA IGUUUAAA | 3422 |
| 842 | UUAAACCC U CACAAAAC | 914 | GUUUUGUG CUGAUGAG GCCGUUAGGC CGAA IGGUUUAA | 3423 |
| 844 | AAACCCUC A CAAAACAA | 915 | UUGUUUUG CUGAUGAG GCCGUUAGGC CGAA IAGGGUUU | 3424 |
| 846 | ACCCUCAC A AAACAAAA | 916 | UUUUGUUU CUGAUGAG GCCGUUAGGC CGAA IUGAGGGU | 3425 |
| 851 | CACAAAAC A AAAAGAUG | 917 | CAUCUUUU CUGAUGAG GCCGUUAGGC CGAA IUUUUGUG | 3426 |
| 869 | GGAUAUUC C CUUAACUU | 918 | AAGUUAAG CUGAUGAG GCCGUUAGGC CGAA IAAUAUCC | 3427 |
| 870 | GAUAUUCC C UUAACUUC | 919 | GAAGUUAA CUGAUGAG GCCGUUAGGC CGAA IGAAUAUC | 3428 |
| 871 | AUAUUCCC U UAACUUCA | 920 | UGAAGUUA CUGAUGAG GCCGUUAGGC CGAA IGGAAUAU | 3429 |
| 876 | CCCUUAAC U UCAUGGGA | 921 | UCCCAUGA CUGAUGAG GCCGUUAGGC CGAA IUUAAGGG | 3430 |
| 879 | UUAACUUC A UGGGAUAU | 922 | AUAUCCCA CUGAUGAG GCCGUUAGGC CGAA IAAGUUAA | 3431 |
| 906 | GUUGGGGC A CAUUGCCA | 923 | UGGCAAUG CUGAUGAG GCCGUUAGGC CGAA ICCCCAAC | 3432 |
| 908 | UGGGGCAC A UUGCCACA | 924 | UGUGGCAA CUGAUGAG GCCGUUAGGC CGAA IUGCCCCA | 3433 |
| 913 | UACAUUGC C ACAGGAAC | 925 | GUUCCUGU CUGAUGAG GCCGUUAGGC CGAA ICAAUGUG | 3434 |
| 914 | ACAUUGCC A CAGGAACA | 926 | UGUUCCUG CUGAUGAG GCCGUUAGGC CGAA IGCAAUGU | 3435 |
| 916 | AUUGCCAC A GGAACAUA | 927 | UAUGUUCC CUGAUGAG GCCGUUAGGC CGAA IUGGCAAU | 3436 |
| 922 | ACAGGAAC A UAUUGUAC | 928 | GUACAAUA CUGAUGAG GCCGUUAGGC CGAA IUUCCUGU | 3437 |
| 931 | UAUUGUAC A AAAAAUCA | 929 | UGAUUUUU CUGAUGAG GCCGUUAGGC CGAA IUACAAUA | 3438 |
| 939 | AAAAAAUC A AAAUGUGU | 930 | ACACAUUU CUGAUGAG GCCGUUAGGC CGAA IAUUUUUU | 3439 |
| 958 | UAGGAAAC U UCCUGUAA | 931 | UUACAGGA CUGAUGAG GCCGUUAGGC CGAA IUUUCCUA | 3440 |
| 961 | GAAACUUC C UGUAAACA | 932 | UGUUUACA CUGAUGAG GCCGUUAGGC CGAA IAAGUUUC | 3441 |
| 962 | AAACUUCC U GUAAACAG | 933 | UUGUUUAC CUGAUGAG GCCGUUAGGC CGAA IGAAGUUU | 3442 |
| 969 | CUGUAAAC A GGCCUAUU | 934 | AAUAGGCC CUGAUGAG GCCGUUAGGC CGAA IUUUACAG | 3443 |
| 973 | AAACAGGC C UAUUGAUU | 935 | AAUCAAUA CUGAUGAG GCCGUUAGGC CGAA ICCUGUUU | 3444 |
| 974 | AACAGGCC U AUUGAUUG | 936 | CAAUCAAU CUGAUGAG GCCGUUAGGC CGAA IGCCUGUU | 3445 |
| 994 | AGUAUGUC A ACGAAUUG | 937 | CAAUUCGU CUGAUGAG GCCGUUAGGC CGAA IACAUACU | 3446 |
| 1009 | UGUGGGUC U UUUGGGGU | 938 | ACCCCAAA CUGAUGAG GCCGUUAGGC CGAA IACCCACA | 3447 |
| 1022 | GGGUUUGC C GCCCCUUU | 939 | AAAGGGGC CUGAUGAG GCCGUUAGGC CGAA ICAAACCC | 3448 |
| 1025 | UUUGCCGC C CCUUUCAC | 940 | GUGAAAGG CUGAUGAG GCCGUUAGGC CGAA ICGGCAAA | 3449 |
| 1026 | UUGCCGCC C CUUUCACG | 941 | CGUGAAAG CUGAUGAG GCCGUUAGGC CGAA IGCGGCAA | 3450 |
| 1027 | UGCCGCCC C UUUCACGC | 942 | GCGUGAAA CUGAUGAG GCCGUUAGGC CGAA IGGCGGCA | 3451 |
| 1028 | GCCGCCCC U UUCACGCA | 943 | UGCGUGAA CUGAUGAG GCCGUUAGGC CGAA IGGGCGGC | 3452 |
| 1032 | CCCCUUUC A CGCAAUGU | 944 | ACAUUGCG CUGAUGAG GCCGUUAGGC CGAA IAAAGGGG | 3453 |
| 1036 | UUUCACGC A AUGUGGAU | 945 | AUCCACAU CUGAUGAG GCCGUUAGGC CGAA ICGUGAAA | 3454 |
| 1049 | GGAUAUUC U GCUUUAAU | 946 | AUUAAAGC CUGAUGAG GCCGUUAGGC CGAA IAAUAUCC | 3455 |
| 1052 | UAUUCUGC U UUAAUGCC | 947 | GGCAUUAA CUGAUGAG GCCGUUAGGC CGAA ICAGAAUA | 3456 |
| 1060 | UUUAAUGC C UUUAUAUG | 948 | CAUAUAAA CUGAUGAG GCCGUUAGGC CGAA ICAUUAAA | 3457 |
| 1061 | UUAAUGCC U UUAUAUGC | 949 | GCAUAUAA CUGAUGAG GCCGUUAGGC CGAA IGCAUUAA | 3458 |
| 1070 | UUAUAUGC A UGCAUACA | 950 | UGUAUGCA CUGAUGAG GCCGUUAGGC CGAA ICAUAUAA | 3459 |
| 1074 | AUGCAUGC A UACAAGCA | 951 | UGCUUGUA CUGAUGAG GCCGUUAGGC CGAA ICAUGCAU | 3460 |
| 1078 | AUGCAUAC A AGCAAAAC | 952 | GUUUUGCU CUGAUGAG GCCGUUAGGC CGAA IUAUGCAU | 3461 |
| 1082 | AUACAAGC A AAACAGGC | 953 | GCCUGUUU CUGAUGAG GCCGUUAGGC CGAA ICUUGUAU | 3462 |
| 1087 | AGCAAAAC A GGCUUUUA | 954 | UAAAAGCC CUGAUGAG GCCGUUAGGC CGAA IUUUUGCU | 3463 |
| 1091 | AAACAGGC U UUUACUUU | 955 | AAAGUAAA CUGAUGAG GCCGUUAGGC CGAA ICCUGUUU | 3464 |
| 1097 | GCUUUUAC U UUCUCGCC | 956 | GGCGAGAA CUGAUGAG GCCGUUAGGC CGAA IUAAAAGC | 3465 |
| 1101 | UUACUUUC U CGCCAACU | 957 | AGUUGGCG CUGAUGAG GCCGUUAGGC CGAA IAAAGUAA | 3466 |
| 1105 | UUUCUCGC C AACUUACA | 958 | UGUAAGUU CUGAUGAG GCCGUUAGGC CGAA ICGAGAAA | 3467 |
| 1106 | UUCUCGCC A ACUUACAA | 959 | UUGUAAGU CUGAUGAG GCCGUUAGGC CGAA IGCGAGAA | 3468 |
| 1109 | UCGCCAAC U UACAAGGC | 960 | GCCUUGUA CUGAUGAG GCCGUUAGGC CGAA IUUGGCGA | 3469 |
| 1113 | UAACUUAC A AGGCCUUU | 961 | AAAGGCCU CUGAUGAG GCCGUUAGGC CGAA IUAAGUUG | 3470 |
| 1118 | UACAAGGC C UUUCUAAG | 962 | CUUAGAAA CUGAUGAG GCCGUUAGGC CGAA ICCUUGUA | 3471 |
| 1119 | ACAAGGCC U UUCUAAGU | 963 | ACUUAGAA CUGAUGAG GCCGUUAGGC CGAA IGCCUUGU | 3472 |
| 1123 | GGCCUUUC U AAGUAAAC | 964 | GUUUACUU CUGAUGAG GCCGUUAGGC CGAA IAAAGGCC | 3473 |
| 1132 | AAGUAAAC A GUAUGUGA | 965 | UCACAUAC CUGAUGAG GCCGUUAGGC CGAA IUUUACUU | 3474 |
| 1143 | AUGUGAAC C UUUACCCC | 966 | GGGGUAAA CUGAUGAG GCCGUUAGGC CGAA IUUCACAU | 3475 |
| 1144 | UGUGAACC U UUACCCCG | 967 | CGGGGUAA CUGAUGAG GCCGUUAGGC CGAA IGUUCACA | 3476 |
| 1149 | ACCUUUAC C CCGUUGCU | 968 | AGCAACGG CUGAUGAG GCCGUUAGGC CGAA IUAAAGGU | 3477 |
| 1150 | CCUUUACC C CGUUGCUC | 969 | GAGCAACG CUGAUGAG GCCGUUAGGC CGAA IGUAAAGG | 3478 |
| 1151 | CUUUACCC C GUUGCUCG | 970 | CGAGCAAC CUGAUGAG GCCGUUAGGC CGAA IGGUAAAG | 3479 |
| 1157 | CCCGUUGC U CGGCAACG | 971 | CGUUGCCG CUGAUGAG GCCGUUAGGC CGAA ICAACGGG | 3480 |
| 1162 | UGCUCGGC A ACGGCCUG | 972 | CAGGCCGU CUGAUGAG GCCGUUAGGC CGAA ICCGAGCA | 3481 |
| 1168 | GCAACGGC C UGGUCUAU | 973 | AUAGACCA CUGAUGAG GCCGUUAGGC CGAA ICCGUUGC | 3482 |
| 1169 | CAACGGCC U GGUCUAUG | 974 | CAUAGACC CUGAUGAG GCCGUUAGGC CGAA IGCCGUUG | 3483 |
| 1174 | GCCUGGUC U AUGCCAAG | 975 | CUUGGCAU CUGAUGAG GCCGUUAGGC CGAA IACCAGGC | 3484 |
| 1179 | GUCUAUGC C AAGUGUUU | 976 | AAACACUU CUGAUGAG GCCGUUAGGC CGAA ICAUAGAC | 3485 |
| 1180 | UCUAUGCC A AGUGUUUG | 977 | CAAACACU CUGAUGAG GCCGUUAGGC CGAA IGCAUAGA | 3486 |
| 1190 | GUGUUUGC U GACGCAAC | 978 | GUUGCGUC CUGAUGAG GCCGUUAGGC CGAA ICAAACAC | 3487 |
| 1196 | GCUGACGC A ACCCCCAC | 979 | GUGGGGGU CUGAUGAG GCCGUUAGGC CGAA ICGUCAGC | 3488 |
| 1199 | GACGCAAC C CCCACUGG | 980 | CCAGUGGG CUGAUGAG GCCGUUAGGC CGAA IUUGCGUC | 3489 |
| 1200 | ACGCAACC C CCACUGGU | 981 | ACCAGUGG CUGAUGAG GCCGUUAGGC CGAA IGUUGCGU | 3490 |
| 1201 | CGCAACCC C CACUGGUU | 982 | AACCAGUG CUGAUGAG GCCGUUAGGC CGAA IGGUUGCG | 3491 |
| 1202 | GCAACCCC C ACUGGUUG | 983 | UAACCAGU CUGAUGAG GCCGUUAGGC CGAA IGGGUUGC | 3492 |
| 1203 | CAACCCCC A CUGGUUGG | 984 | CCAACCAG CUGAUGAG GCCGUUAGGC CGAA IGGGGUUG | 3493 |
| 1205 | ACCCCCAC U GGUUGGGG | 985 | CCCCAACC CUGAUGAG GCCGUUAGGC CGAA IUGGGGGU | 3494 |
| 1215 | GUUGGGGC U UGGCCAUA | 986 | UAUGGCCA CUGAUGAG GCCGUUAGGC CGAA ICCCCAAC | 3495 |
| 1220 | GGCUUGGC C AUAGGCCA | 987 | UGGCCUAU CUGAUGAG GCCGUUAGGC CGAA ICCAAGCC | 3496 |
| 1221 | GCUUGGCC A UAGGCCAU | 988 | AUGGCCUA CUGAUGAG GCCGUUAGGC CGAA IGCCAAGC | 3497 |
| 1227 | CCAUAGGC C AUCAGCGC | 989 | GCGCUGAU CUGAUGAG GCCGUUAGGC CGAA ICCUAUGG | 3498 |
| 1228 | CAUAGGCC A UCAGCGCA | 990 | UGCGCUGA CUGAUGAG GCCGUUAGGC CGAA IGCCUAUG | 3499 |
| 1231 | AGGCCAUC A GCGCAUGC | 991 | GCAUGCGC CUGAUGAG GCCGUUAGGC CGAA IAUGGCCU | 3500 |
| 1236 | AUCAGCGC A UGCGUGGA | 992 | UCCACGCA CUGAUGAG GCCGUUAGGC CGAA ICGCUGAU | 3501 |
| 1247 | CGUGGAAC C UUUGUGUC | 993 | GACACAAA CUGAUGAG GCCGUUAGGC CGAA IUUCCACG | 3502 |
| 1248 | GUGGAACC U UUGUGUCU | 994 | AGACACAA CUGAUGAG GCCGUUAGGC CGAA IGUUCCAC | 3503 |
| 1256 | UUUGUGUC U CCUCUGCC | 995 | GGCAGAGG CUGAUGAG GCCGUUAGGC CGAA IACACAAA | 3504 |
| 1258 | UGUGUCUC C UCUGCCGA | 996 | UCGGCAGA CUGAUGAG GCCGUUAGGC CGAA IAGACACA | 3505 |
| 1259 | GUGUCUCC U CUGCCGAU | 997 | AUCGGCAG CUGAUGAG GCCGUUAGGC CGAA IGAGACAC | 3506 |
| 1261 | GUCUCCUC U GCCGAUCC | 998 | GGAUCGGC CUGAUGAG GCCGUUAGGC CGAA IAGGAGAC | 3507 |
| 1264 | UCCUCUGC C GAUCCAUA | 999 | UAUGGAUC CUGAUGAG GCCGUUAGGC CGAA ICAGAGGA | 3508 |
| 1269 | UGCCGAUC C AUACCGCG | 1000 | CGCGGUAU CUGAUGAG GCCGUUAGGC CGAA IAUCGGCA | 3509 |
| 1270 | GCCGAUCC A UACCGCGG | 1001 | CCGCGGUA CUGAUGAG GCCGUUAGGC CGAA IGAUCGGC | 3510 |
| 1274 | AUCCAUAC C GCGGAACU | 1002 | AGUUCCGC CUGAUGAG GCCGUUAGGC CGAA IUAUGGAU | 3511 |
| 1282 | CGCGGAAC U CCUAGCCG | 1003 | CGGCUAGC CUGAUGAG GCCGUUAGGC CGAA IUUCCGCG | 3512 |
| 1284 | CGGAACUC C UAGCCGCU | 1004 | AGCGGCUA CUGAUGAG GCCGUUAGGC CGAA IAGUUCCG | 3513 |
| 1285 | GGAACUCC U AGCCGCUU | 1005 | AAGCGGCU CUGAUGAG GCCGUUAGGC CGAA IGAGUUCC | 3514 |
| 1289 | CUCCUAGC C GCUUGUUU | 1006 | AAACAAGC CUGAUGAG GCCGUUAGGC CGAA ICUAGGAG | 3515 |
| 1292 | CUAGCCGC U UGUUUUGC | 1007 | GCAAAACA CUGAUGAG GCCGUUAGGC CGAA ICGGCUAG | 3516 |
| 1301 | UGUUUUGC U CGCAGCAG | 1008 | CUGCUGCG CUGAUGAG GCCGUUAGGC CGAA ICAAAACA | 3517 |
| 1305 | UUGCUCGC A GCAGGUCU | 1009 | AGACCUGC CUGAUGAG GCCGUUAGGC CGAA ICGAGCAA | 3518 |
| 1308 | CUCGCAGC A GGUCUGUG | 1010 | CCCAGACC CUGAUGAG GCCGUUAGGC CGAA ICUGCGAG | 3519 |
| 1313 | ACCAGGUC U GGGGCAAA | 1011 | UUUGCCCC CUGAUGAG GCCGUUAGGC CGAA IACCUGCU | 3520 |
| 1319 | UCUGGGGC A AAACUCAU | 1012 | AUGAGGUG CUGAUGAG GCCGUUAGGC CGAA ICCCCAGA | 3521 |
| 1324 | GGCAAAAC U CAUCGGGA | 1013 | UCCCGAUG CUGAUGAG GCCGUUAGGC CGAA IUUUUGCC | 3522 |
| 1326 | CAAAACUC A UCGGGACU | 1014 | AGUCCCGA CUGAUGAG GCCGUUAGGC CGAA IAGUUUUG | 3523 |
| 1334 | AUCGGGAC U GACAAUUC | 1015 | GAAUUGUC CUGAUGAG GCCGUUAGGC CGAA IUCCCGAU | 3524 |
| 1338 | GGACUGAC A AGUCUGUC | 1016 | GACAGAAU CUGAUGAG GCCGUUAGGC CGAA IUCAGUCC | 3525 |
| 1343 | GACAAUUC U GUCGUGCU | 1017 | AGCACGAC CUGAUGAG GCCGUUAGGC CGAA IAAUUGUC | 3526 |
| 1351 | UGUCGUGC U CUCCCGCA | 1018 | UGCGGGAG CUGAUGAG GCCGUUAGGC CGAA ICACGACA | 3527 |
| 1353 | UCGUGCUC U CCCGCAAA | 1019 | UUUGCGGG CUGAUGAG GCCGUUAGGC CGAA IAGCACGA | 3528 |
| 1355 | GUGCUCUC C CGCAAAUA | 1020 | UAUUUGCG CUGAUGAG GCCGUUAGGC CGAA IAGAGCAC | 3529 |
| 1356 | UGCUCUCC C GCAAAUAU | 1021 | AUAUUUGC CUGAUGAG GCCGUUAGGC CGAA IGAGAGCA | 3530 |
| 1359 | UCUCCCGC A AAUAUACA | 1022 | UGUAUAUU CUGAUGAG GCCGUUAGGC CGAA ICGGGAGA | 3531 |
| 1367 | AAAUAUAC A UCAUUUCC | 1023 | GGAAAUGA CUGAUGAG GCCGUUAGGC CGAA IUAUAUUU | 3532 |
| 1370 | UAUACAUC A UUUCCAUG | 1024 | CAUGGAAA CUGAUGAG GCCGUUAGGC CGAA IAUGUAUA | 3533 |
| 1375 | AUCAUUUC C AUGGCUGC | 1025 | GCAGCCAU CUGAUGAG GCCGUUAGGC CGAA IAAAUGAU | 3534 |
| 1376 | UCAUUUCC A UGGCUGCU | 1026 | AGCAGCCA CUGAUGAG GCCGUUAGGC CGAA IGAAAUGA | 3535 |
| 1381 | UCCAUGGC U GCUAGGCU | 1027 | AGCCUAGC CUGAUGAG GCCGUUAGGC CGAA ICCAUGGA | 3536 |
| 1384 | AUGGCUGC U AGGCUGUG | 1028 | CACAGCCU CUGAUGAG GCCGUUAGGC CGAA ICAGCCAU | 3537 |
| 1389 | UGCUAGGC U GUGCUGCC | 1029 | GGCAGCAC CUGAUGAG GCCGUUAGGC CGAA ICCUAGCA | 3538 |
| 1394 | GGCUGUGC U GCCAACUG | 1030 | CAGUUGGC CUGAUGAG GCCGUUAGGC CGAA ICACAGCC | 3539 |
| 1397 | UGUGCUGC C AACUGGAU | 1031 | AUCCAGUU CUGAUGAG GCCGUUAGGC CGAA ICAGCACA | 3540 |
| 1398 | GUGCUGCC A ACUGGAUC | 1032 | GAUCCAGU CUGAUGAG GCCGUUAGGC CGAA IGCAGCAC | 3541 |
| 1401 | CUGCCAAC U GGAUCCUA | 1033 | UAGGAUCC CUGAUGAG GCCGUUAGGC CGAA IUUGGCAG | 3542 |
| 1407 | ACUGGAUC C UACGCGGG | 1034 | CCCGCGUA CUGAUGAG GCCGUUAGGC CGAA IAUCCAGU | 3543 |
| 1408 | CUGGAUCC U ACGCGGGA | 1035 | UCCCGCGU CUGAUGAG GCCGUUAGGC CGAA IGAUCCAG | 3544 |
| 1421 | GGGACGUC C UUUGUUUA | 1036 | UAAACAAA CUGAUGAG GCCGUUAGGC CGAA IACGUCCC | 3545 |
| 1422 | GGACGUCC U GUGUUUAC | 1037 | GUAAACAA CUGAUGAG GCCGUUAGGC CGAA IGACGUCC | 3546 |
| 1434 | UUUACGUC C CGUCGGCG | 1038 | CGCCGACG CUGAUGAG GCCGUUAGGC CGAA IACGUAAA | 3547 |
| 1435 | UUACGUCC C GUCGGCGC | 1039 | GCGCCGAC CUGAUGAG GCCGUUAGGC CGAA IGACGUAA | 3548 |
| 1444 | GUCGGCGC U GAAUCCCG | 1040 | CGGGAUUC CUGAUGAG GCCGUUAGGC CGAA ICGCCGAC | 3549 |
| 1450 | GCUGAAUC C CGCGGACG | 1041 | CGUCCGCG CUGAUGAG GCCGUUAGGC CGAA IAUUCAGC | 3550 |
| 1451 | CUGAAUCC C GCGGACGA | 1042 | UCGUCCGC CUGAUGAG GCCGUUAGGC CGAA IGAGUCAG | 3551 |
| 1461 | CGGACGAC C CCUCCCGG | 1043 | UCGGGAGG CUGAUGAG GCCGUUAGGC CGAA IUCGUCCG | 3552 |
| 1462 | GGACGACC C CUCCCGGG | 1044 | CCCGGGAG CUGAUGAG GCCGUUAGGC CGAA IGUCGUCC | 3553 |
| 1463 | GACGACCC C UCCCGGGG | 1045 | CCCCGGGA CUGAUGAG GCCGUUAGGC CGAA IGGUCGUC | 3554 |
| 1464 | ACGACCCC U CCCGGGGC | 1046 | GCCCCGGG CUGAUGAG GCCGUUAGGC CGAA IGGGUCGU | 3555 |
| 1466 | GACCCCUC C CGGGGCCG | 1047 | CGGCCCCG CUGAUGAG GCCGUUAGGC CGAA IAGGGGUC | 3556 |
| 1467 | ACCCCUCC C GGGGCCGC | 1048 | GCGGCCCC CUGAUGAG GCCGUUAGGC CGAA IGAGGGGU | 3557 |
| 1473 | UCCGGGGC C GCUUGGGG | 1049 | CCCCAAGC CUGAUGAG GCCGUUAGGC CGAA ICCCCGGG | 3558 |
| 1476 | GGGGCCGC U UGGGGCUC | 1050 | GAGCCCCA CUGAUGAG GCCGUUAGGC CGAA ICGGCCCC | 3559 |
| 1483 | UUUGGGGC U CUACCGCC | 1051 | GGCGGUAG CUGAUGAG GCCGUUAGGC CGAA ICCCCAAG | 3560 |
| 1485 | UGGGGCUC U ACCGCCCG | 1052 | CGGGCGGU CUGAUGAG GCCGUUAGGC CGAA IAGCCCCA | 3561 |
| 1488 | GGCUCUAC C GCCCGCUU | 1053 | AAGCGGGC CUGAUGAG GCCGUUAGGC CGAA IUAGAGCC | 3562 |
| 1491 | UCUACCGC C CGCUUCUC | 1054 | GAGAAGCG CUGAUGAG GCCGUUAGGC CGAA ICGGUAGA | 3563 |
| 1492 | CUACCGCC C GCUUCUCC | 1055 | GGAGAAGC CUGAUGAG GCCGUUAGGC CGAA IGCGGUAG | 3564 |
| 1495 | CCGCCCGC U UCUCCGCC | 1056 | GGCGGAGA CUGAUGAG GCCGUUAGGC CGAA ICGGGCGG | 3565 |
| 1498 | CCCGCUUC U CCGCCUAU | 1057 | AUAGGCGG CUGAUGAG GCCGUUAGGC CGAA IAAGCGGG | 3566 |
| 1500 | CGCUUCUC C GCCUAUUG | 1058 | CAAUAGGC CUGAUGAG GCCGUUAGGC CGAA IAGAAGCG | 3567 |
| 1503 | UUCUCCGC C UAUUGUAC | 1059 | GUACAAUA CUGAUGAG GCCGUUAGGC CGAA ICGGAGAA | 3568 |
| 1504 | UCUCCGCC U AUUGUACC | 1060 | GGUACAAU CUGAUGAG GCCGUUAGGC CGAA IGCGGAGA | 3569 |
| 1512 | UAUUGUAC C GACCGUCC | 1061 | GGACGGUC CUGAUGAG GCCGUUAGGC CGAA IUACAAUA | 3570 |
| 1516 | GUACCGAC C GUCCACGG | 1062 | CCGUGGAC CUGAUGAG GCCGUUAGGC CGAA IUCGGUAC | 3571 |
| 1520 | CGACCGUC C ACGGGGCG | 1063 | UGCCCCGU CUGAUGAG GCCGUUAGGC CGAA IACGGUCG | 3572 |
| 1521 | GACCGUCC A CGGGGCGC | 1064 | GCGCCCCG CUGAUGAG GCCGUUAGGC CGAA IGACGGUC | 3573 |
| 1530 | CGGGGCGC A CCUCUCUU | 1065 | AAGAGAGG CUGAUGAG GCCGUUAGGC CGAA ICGCCCCG | 3574 |
| 1532 | GGGCGCAC C UCUCUUUA | 1066 | UAAAGAGA CUGAUGAG GCCGUUAGGC CGAA IUGCGCCC | 3575 |
| 1533 | GGCGCACC U CUCUUUAC | 1067 | GUAAAGAG CUGAUGAG GCCGUUAGGC CGAA IGUGCGCC | 3576 |
| 1535 | CGCACCUC U CUUUACGC | 1068 | GCGUAAAG CUGAUGAG GCCGUUAGGC CGAA IAGGUGCG | 3577 |
| 1537 | CACCUCUC U UUACGCGG | 1069 | CCGCGUAA CUGAUGAG GCCGUUAGGC CGAA IAGAGGUG | 3578 |
| 1548 | ACGCGGAC U CCCCGUCU | 1070 | AGACGGGG CUGAUGAG GCCGUUAGGC CGAA IUCCGCGU | 3579 |
| 1550 | UCGGACUC C CCGUCUGU | 1071 | ACAGACGG CUGAUGAG GCCGUUAGGC CGAA IAGUCCGC | 3580 |
| 1551 | CGGACUCC C CGUCUGUG | 1072 | CACAGACG CUGAUGAG GCCGUUAGGC CGAA IGAGUCCG | 3581 |
| 1552 | GGACUCCC C GUCUGUGC | 1073 | GCACAGAC CUGAUGAG GCCGUUAGGC CGAA IGGAGUCC | 3582 |
| 1556 | UCCCCGUC U GUGCCUUC | 1074 | GAAGGCAC CUGAUGAG GCCGUUAGGC CGAA IACGGGGA | 3583 |
| 1561 | GUCUGUGC C UUCUCAUC | 1075 | GAUGAGAA CUGAUGAG GCCGUUAGGC CGAA ICACAGAC | 3584 |
| 1562 | UCUGUGCC U UCUCAUCU | 1076 | AGAUGAGA CUGAUGAG GCCGUUAGGC CGAA IGCACAGA | 3585 |
| 1565 | GUGCCUUC U CAUCUGCC | 1077 | GGCAGAUG CUGAUGAG GCCGUUAGGC CGAA IAAGGCAC | 3586 |
| 1567 | GCCUUCUC A UCUGCCGG | 1078 | CCGGCAGA CUGAUGAG GCCGUUAGGC CGAA IAGAAGGC | 3587 |
| 1570 | UUCUCAUC U GCCGGACC | 1079 | GGUCCGGC CUGAUGAG GCCGUUAGGC CGAA IAUGAGAA | 3588 |
| 1573 | UCAUCUGC C GGACCGUG | 1080 | CACGGUCC CUGAUGAG GCCGUUAGGC CGAA ICAGAUGA | 3589 |
| 1578 | UGCCGGAC C GUGUGCAC | 1081 | GUGCACAC CUGAUGAG GCCGUUAGGC CGAA IUCCGGCA | 3590 |
| 1585 | CCGUGUGC A CUUCGCUU | 1082 | AAGCGAAG CUGAUGAG GCCGUUAGGC CGAA ICACACGG | 3591 |
| 1587 | GUGUGCAC U UCGCUUCA | 1083 | UGAAGCGA CUGAUGAG GCCGUUAGGC CGAA IUGCACAC | 3592 |
| 1592 | CACUUCGC U UCACCUCU | 1084 | AGAGGUGA CUGAUGAG GCCGUUAGGC CGAA ICGAAGUG | 3593 |
| 1595 | UUCGCUUC A CCUCUGCA | 1085 | UGCAGAGG CUGAUGAG GCCGUUAGGC CGAA IAAGCGAA | 3594 |
| 1597 | CGCUUCAC C UCUGCACG | 1086 | CGUGCAGA CUGAUGAG GCCGUUAGGC CGAA IUGAAGCG | 3595 |
| 1598 | GCUUCACC U CUGCACGU | 1087 | ACGUGCAG CUGAUGAG GCCGUUAGGC CGAA IGUGAAGC | 3596 |
| 1600 | UUCACCUC U GCACGUCG | 1088 | CGACGUGC CUGAUGAG GCCGUUAGGC CGAA IAGGUGAA | 3597 |
| 1603 | ACCUCUGC A CGUCGCAU | 1089 | AUGCGACG CUGAUGAG GCCGUUAGGC CGAA ICAGAGGU | 3598 |
| 1610 | CACGUCGC A UGGAGACC | 1090 | GGUCUCCA CUGAUGAG GCCGUUAGGC CGAA ICGACGUG | 3599 |
| 1618 | AUGGAGAC C ACCGUGAA | 1091 | UUCACGGU CUGAUGAG GCCGUUAGGC CGAA IUCUCCAU | 3600 |
| 1619 | UGGAGACC A CCGUGAAC | 1092 | GUUCACGG CUGAUGAG GCCGUUAGGC CGAA IGUCUCCA | 3601 |
| 1621 | GAGACCAC C GUGAACGC | 1093 | GCGUUCAC CUGAUGAG GCCGUUAGGC CGAA IUGGUCUC | 3602 |
| 1630 | GUGAACGC C CACAGGAA | 1094 | UUCCUGUG CUGAUGAG GCCGUUAGGC CGAA ICGUUCAC | 3603 |
| 1631 | UGAACGCC C ACAGGAAC | 1095 | GUUCCUGU CUGAUGAG GCCGUUAGGC CGAA IGCGUUCA | 3604 |
| 1632 | GAACGCCC A CAGGAACC | 1096 | GGUUCCUG CUGAUGAG GCCGUUAGGC CGAA IGGCGUUC | 3605 |
| 1634 | ACGCCCAC A GGAACCUG | 1097 | CAGGUUCC CUGAUGAG GCCGUUAGGC CGAA IUGGGCGU | 3606 |
| 1640 | ACAGGAAC C UGCCCAAG | 1098 | CUUGGGCA CUGAUGAG GCCGUUAGGC CGAA IUUCCUGU | 3607 |
| 1641 | CAGGAACC U GCCCAAGG | 1099 | CCUUGGGC CUGAUGAG GCCGUUAGGC CGAA IGUUCCUG | 3608 |
| 1644 | GAACCUGC C CAAGGUCU | 1100 | AGACCUUG CUGAUGAG GCCGUUAGGC CGAA ICAGGUUC | 3609 |
| 1645 | AACCUGCC C AAGGUCUU | 1101 | AAGACCUU CUGAUGAG GCCGUUAGGC CGAA IGCAGGUU | 3610 |
| 1646 | ACCUGCCC A AGGUCUUG | 1102 | CAAGACCU CUGAUGAG GCCGUUAGGC CGAA IGGCAGGU | 3611 |
| 1652 | CCAAGGUC U UGCAUAAG | 1103 | UUUAUGCA CUGAUGAG GCCGUUAGGC CGAA IACCUUGG | 3612 |
| 1656 | GGUCUUGC A UAAGAGGA | 1104 | UCCUCUUA CUGAUGAG GCCGUUAGGC CGAA ICAAGACC | 3613 |
| 1666 | AAGAGGAC U CUUGGACU | 1105 | AGUCCAAG CUGAUGAG GCCGUUAGGC CGAA IUCCUCUU | 3614 |
| 1668 | GAGGACUC U UGGACUUU | 1106 | AAAGUCCA CUGAUGAG GCCGUUAGGC CGAA IAGUCCUC | 3615 |
| 1674 | UCUUGGAC U UUCAGCAA | 1107 | UUGCUGAA CUGAUGAG GCCGUUAGGC CGAA IUCCAAGA | 3616 |
| 1678 | GGACUUUC A GCAAUGUC | 1108 | GACAUUGC CUGAUGAG GCCGUUAGGC CGAA IAAAGUCC | 3617 |
| 1681 | CUUUCAGC A AUGUCAAC | 1109 | GUUGACAU CUGAUGAG GCCGUUAGGC CGAA ICUGAAAG | 3618 |
| 1687 | GCAAUGUC A ACGACCGA | 1110 | UCGGUCGU CUGAUGAG GCCGUUAGGC CGAA IACAUUGC | 3619 |
| 1693 | UCAACGAC C GACCUUGA | 1111 | UCAAGGUC CUGAUGAG GCCGUUAGGC CGAA IUCGUUGA | 3620 |
| 1697 | CGACCGAC C UUGAGGCA | 1112 | UGCCUCAA CUGAUGAG GCCGUUAGGC CGAA IUCGGUCG | 3621 |
| 1698 | GACCGACC U UGAGGCAU | 1113 | AUGCCUCA CUGAUGAG GCCGUUAGGC CGAA IGUCGGUC | 3622 |
| 1705 | CUUGAGGC A UACUUCAA | 1114 | UUGAAGUA CUGAUGAG GCCGUUAGGC CGAA ICCUCAAG | 3623 |
| 1709 | AGGCAUAC U UCAAAGAC | 1115 | GUCUUUGA CUGAUGAG GCCGUUAGGC CGAA IUAUGCCU | 3624 |
| 1712 | CAUACUUC A AAGACUGU | 1116 | ACAGUCUU CUGAUGAG GCCGUUAGGC CGAA IAAGUAUG | 3625 |
| 1718 | UCAAAGAC U GUGUGUUU | 1117 | AAACACAC CUGAUGAG GCCGUUAGGC CGAA IUCUUUGA | 3626 |
| 1769 | UAAAGGUC U UUGUACUA | 1118 | UAGUACAA CUGAUGAG GCCGUUAGGC CGAA IACCUUUA | 3627 |
| 1776 | CUUUGUAC U AGGAGGCU | 1119 | AGCCUCCU CUGAUGAG GCCGUUAGGC CGAA IUACAAAG | 3628 |
| 1784 | UAGGAGGC U GUAGGCAU | 1120 | AUGCCUAC CUGAUGAG GCCGUUAGGC CGAA ICCUCCUA | 3629 |
| 1791 | CUGUAGGC A UAAAUUGG | 1121 | CCAAUUUA CUGAUGAG GCCGUUAGGC CGAA ICCUACAG | 3630 |
| 1807 | GUGUGUUC A CCAGCACC | 1122 | GGUGCUGG CUGAUGAG GCCGUUAGGC CGAA IAACACAC | 3631 |
| 1809 | GUGUUCAC C AGCACCAU | 1123 | AUGGUGCU CUGAUGAG GCCGUUAGGC CGAA IUGAACAC | 3632 |
| 1810 | UGUUCACC A GCACCAUG | 1124 | CAUGGUGC CUGAUGAG GCCGUUAGGC CGAA IGUGAACA | 3633 |
| 1813 | UCACCAGC A CCAUGCAA | 1125 | UUGCAUGG CUGAUGAG GCCGUUAGGC CGAA ICUGGUGA | 3634 |
| 1815 | ACCAGCAC C AUGCAACU | 1126 | AGUUGCAU CUGAUGAG GCCGUUAGGC CGAA IUGCUGGU | 3635 |
| 1816 | CCAGCACC A UGCAACUU | 1127 | AAGUUGCA CUGAUGAG GCCGUUAGGC CGAA IGUGCUGG | 3636 |
| 1820 | CACCAUGC A ACUUUUUC | 1128 | GAAAAAGU CUGAUGAG GCCGUUAGGC CGAA ICAUGGUG | 3637 |
| 1823 | CAUGCAAC U UUUUCACC | 1129 | GGUGAAAA CUGAUGAG GCCGUUAGGC CGAA IUUGCAUG | 3638 |
| 1829 | ACUUUUUC A CCUCUGCC | 1130 | GGCAGAGG CUGAUGAG GCCGUUAGGC CGAA IAAAAAGU | 3639 |
| 1831 | UUUUUCAC C UCUGCCUA | 1131 | UAGGCAGA CUGAUGAG GCCGUUAGGC CGAA IUGAAAAA | 3640 |
| 1832 | UUUUCACC U CUGCCUAA | 1132 | UUAGGCAG CUGAUGAG GCCGUUAGGC CGAA IGUGAAAA | 3641 |
| 1834 | UUCACCUC U GCCUAAUC | 1133 | GAUUAGGC CUGAUGAG GCCGUUAGGC CGAA IAGGUGAA | 3642 |
| 1837 | ACCUCUGC C UAAUCAUC | 1134 | GAUGAUUA CUGAUGAG GCCGUUAGGC CGAA ICAGAGGU | 3643 |
| 1838 | CCUCUGCC U AAUCAUCU | 1135 | AGAUGAUU CUGAUGAG GCCGUUAGGC CGAA IGCAGAGG | 3644 |
| 1843 | GCCUAAUC A UCUCAUGU | 1136 | ACAUGAGA CUGAUGAG GCCGUUAGGC CGAA IAUUAGGC | 3645 |
| 1846 | UAAUCAUC U CAUGUUCA | 1137 | UGAACAUG CUGAUGAG GCCGUUAGGC CGAA IAUGAUUA | 3646 |
| 1848 | AUCAUCUC A UGUUCAUG | 1138 | CAUGAACA CUGAUGAG GCCGUUAGGC CGAA IAGAUGAU | 3647 |
| 1854 | UCAUGUUC A UGUCCUAC | 1139 | GUAGGACA CUGAUGAG GCCGUUAGGC CGAA IAACAUGA | 3648 |
| 1859 | UUCAUGUC C UACUGUUC | 1140 | GAACAGUA CUGAUGAG GCCGUUAGGC CGAA IACAUGAA | 3649 |
| 1860 | UCAUGUCC U ACUGUUCA | 1141 | UGAACAGU CUGAUGAG GCCGUUAGGC CGAA IGACAUGA | 3650 |
| 1863 | UGUCCUAC U GUUCAAGC | 1142 | GCUUGAAC CUGAUGAG GCCGUUAGGC CGAA IUAGGACA | 3651 |
| 1868 | UACUGUUC A AGCCUCCA | 1143 | UGGAGGCU CUGAUGAG GCCGUUAGGC CGAA IAACAGUA | 3652 |
| 1872 | GUUCAAGC C UCCAAGCU | 1144 | AGCUUGGA CUGAUGAG GCCGUUAGGC CGAA ICUUGAAC | 3653 |
| 1873 | UUCAAGCC U CCAAGCUG | 1145 | CAGCUUGG CUGAUGAG GCCGUUAGGC CGAA IGCUUGAA | 3654 |
| 1875 | CAAGCCUC C AAGCUGUG | 1146 | CACAGCUU CUGAUGAG GCCGUUAGGC CGAA IAGGCUUG | 3655 |
| 1876 | AAGCCUCC A AGCUGUGC | 1147 | GCACAGCU CUGAUGAG GCCGUUAGGC CGAA IGAGGCUU | 3656 |
| 1880 | CUCCAAGC U GUGCCUUG | 1148 | CAAGGCAC CUGAUGAG GCCGUUAGGC CGAA ICUUGGAG | 3657 |
| 1885 | AGCUGUGC C UUGGGUGG | 1149 | CCACCCAA CUGAUGAG GCCGUUAGGC CGAA ICACAGCU | 3658 |
| 1886 | GCUGUGCC U UGGGUGGC | 1150 | GCCACCCA CUGAUGAG GCCGUUAGGC CGAA IGCACAGC | 3659 |
| 1895 | UGGGUGGC U UUGGGGCA | 1151 | UGCCCCAA CUGAUGAG GCCGUUAGGC CGAA ICCACCCA | 3660 |
| 1903 | UUUGGGGC A UGGACAUU | 1152 | AAUGUCCA CUGAUGAG GCCGUUAGGC CGAA ICCCCAAA | 3661 |
| 1909 | GCAUGGAC A UUGACCCG | 1153 | UGGGUCAA CUGAUGAG GCCGUUAGGC CGAA IUCCAUGC | 3662 |
| 1915 | ACAUUGAC C CGUAUAAA | 1154 | UUUAUACG CUGAUGAG GCCGUUAGGC CGAA IUCAAUGU | 3663 |
| 1916 | CAUUGACC C GUAUAAAG | 1155 | CUUUAUAC CUGAUGAG GCCGUUAGGC CGAA IGUCAAUG | 3664 |
| 1935 | UUUGGAGC U UCUGUGGA | 1156 | UCCACAGA CUGAUGAG GCCGUUAGGC CGAA ICUCCAAA | 3665 |
| 1938 | GGAGCUUC U GUGGAGUU | 1157 | AACUCCAC CUGAUGAG GCCGUUAGGC CGAA IAAGCUCC | 3666 |
| 1949 | GGAGUUAC U CUCUUUUU | 1158 | AAAAAGAG CUGAUGAG GCCGUUAGGC CGAA IUAACUCC | 3667 |
| 1951 | AGUUACUC U CUUUUUUG | 1159 | CAAAAAAG CUGAUGAG GCCGUUAGGC CGAA IAGUAACU | 3668 |
| 1953 | UUACUCUC U UUUUUGCC | 1160 | GGCAAAAA CUGAUGAG GCCGUUAGGC CGAA IAGAGUAA | 3669 |
| 1961 | UUUUUUGC C UUCUGACU | 1161 | AGUCAGAA CUGAUGAG GCCGUUAGGC CGAA ICAAAAAA | 3670 |
| 1962 | UUUUUGCC U UCUGACUU | 1162 | AAGUCAGA CUGAUGAG GCCGUUAGGC CGAA IGCAAAAA | 3671 |
| 1965 | UUGCCUUC U GACUUCUU | 1163 | AAGAAGUC CUGAUGAG GCCGUUAGGC CGAA IAAGGCAA | 3672 |
| 1969 | CUUCUGAC U UCUUUCCU | 1164 | AGGAAAGA CUGAUGAG GCCGUUAGGC CGAA IUCAGAAG | 3673 |
| 1972 | CUGACUUC U UUCCUUCU | 1165 | AGAAGGAA CUGAUGAG GCCGUUAGGC CGAA IAAGUCAG | 3674 |
| 1976 | CUUCUUUC C UUCUAUUC | 1166 | GAAUAGAA CUGAUGAG GCCGUUAGGC CGAA IAAAGAAG | 3675 |
| 1977 | UUCUUUCC U UCUAUUCG | 1167 | CGAAUAGA CUGAUGAG GCCGUUAGGC CGAA IGAAAGAA | 3676 |
| 1980 | UUUCCUUC U AUUCGAGA | 1168 | UCUCGAAU CUGAUGAG GCCGUUAGGC CGAA IAAGGAAA | 3677 |
| 1991 | UCGAGAUC U CCUCGACA | 1169 | UGUCGAGG CUGAUGAG GCCGUUAGGC CGAA IAUCUCGA | 3678 |
| 1993 | GAGAUCUC C UCGACACC | 1170 | GGUGUCGA CUGAUGAG GCCGUUAGGC CGAA IAGAUCUC | 3679 |
| 1994 | AGAUCUCC U CGACACCG | 1171 | CGGUGUCG CUGAUGAG GCCGUUAGGC CGAA IGAGAUCU | 3680 |
| 1999 | UCCUCGAC A CCGCCUCU | 1172 | AGAGGCGG CUGAUGAG GCCGUUAGGC CGAA IUCGAGGA | 3681 |
| 2001 | CUCGACAC C GCCUCUGC | 1173 | GCAGAGGC CUGAUGAG GCCGUUAGGC CGAA IUGUCGAG | 3682 |
| 2004 | GACACCGC C UCUGCUCU | 1174 | AGAGCAGA CUGAUGAG GCCGUUAGGC CGAA ICGGUGUC | 3683 |
| 2005 | ACACCGCC U CUGCUCUG | 1175 | CAGAGCAG CUGAUGAG GCCGUUAGGC CGAA IGCGGUGU | 3684 |
| 2007 | ACCGCCUC U GCUCUGUA | 1176 | UACAGAGC CUGAUGAG GCCGUUAGGC CGAA IAGGCGGU | 3685 |
| 2010 | GCCUCUGC U CUGUAUCG | 1177 | CGAUACAG CUGAUGAG GCCGUUAGGC CGAA ICAGAGGC | 3686 |
| 2012 | CUCUCCUC U GUAUCGGG | 1178 | CCCGAUAC CUGAUGAG GCCGUUAGGC CGAA IAGCAGAG | 3687 |
| 2025 | CGGGGGGC C UUAGAGUC | 1179 | GACUCUAA CUGAUGAG GCCGUUAGGC CGAA ICCCCCCG | 3688 |
| 2026 | GGGGGGCC U UAGAGUCU | 1180 | AGACUCUA CUGAUGAG GCCGUUAGGC CGAA IGCCCCCC | 3689 |
| 2034 | UUAGAGUC U CCGGAACA | 1181 | UGUUCCGG CUGAUGAG GCCGUUAGGC CGAA IACUCUAA | 3690 |
| 2036 | AGAGUCUC C GGAACAUU | 1182 | AAUGUUCC CUGAUGAG GCCGUUAGGC CGAA IAGACUCU | 3691 |
| 2042 | UCCGGAAC A UUGUUCAC | 1183 | GUGAACAA CUGAUGAG GCCGUUAGGC CGAA IUUCCGGA | 3692 |
| 2049 | CAUUGUUC A CCUCACCA | 1184 | UGGUGAGG CUGAUGAG GCCGUUAGGC CGAA IAACAAUG | 3693 |
| 2051 | UUGUUCAC C UCACCAUA | 1185 | UAUGGUGA CUGAUGAG GCCGUUAGGC CGAA IUGAACAA | 3694 |
| 2052 | UGUUCACC U CACCAUAC | 1186 | GUAUGGUG CUGAUGAG GCCGUUAGGC CGAA IGUGAACA | 3695 |
| 2054 | UUCACCUC A CCAUACGG | 1187 | CCGUAUGG CUGAUGAG GCCGUUAGGC CGAA IAGGUGAA | 3696 |
| 2056 | CACCUCAC C AUACGGCA | 1188 | UGCCGUAU CUGAUGAG GCCGUUAGGC CGAA IUGAGGUG | 3697 |
| 2057 | ACCUCACC A UACGGCAC | 1189 | GUGCCGUA CUGAUGAG GCCGUUAGGC CGAA IGUGAGGU | 3698 |
| 2064 | CAUACGGC A CUCAGGCA | 1190 | UGCCUGAG CUGAUGAG GCCGUUAGGC CGAA ICCGUAUG | 3699 |
| 2066 | UACGGCAC U CAGGCAAG | 1191 | CUUUCCUG CUGAUGAG GCCGUUAGGC CGAA IUGCCGUA | 3700 |
| 2068 | CGGCACUC A GGCAAGCU | 1192 | AGCUUGCC CUGAUGAG GCCGUUAGGC CGAA IAGUGCCG | 3701 |
| 2072 | ACUCAGGC A AGCUAUUC | 1193 | GAAUAGCU CUGAUGAG GCCGUUAGGC CGAA ICCUGAGU | 3702 |
| 2076 | AGGCAAGC U AUUCUGUG | 1194 | CACAGAAU CUGAUGAG GCCGUUAGGC CGAA ICUUGCCU | 3703 |
| 2081 | AGCUAUUC U GUGUUGGG | 1195 | CCCAACAC CUGAUGAG GCCGUUAGGC CGAA IAAUAGCU | 3704 |
| 2105 | GAUGAAUC U AGCCACCU | 1196 | AGGUGGCU CUGAUGAG GCCGUUAGGC CGAA IAUUCAUC | 3705 |
| 2109 | AAUCUAGC C ACCUGGGU | 1197 | ACCCAGGU CUGAUGAG GCCGUUAGGC CGAA ICUAGAUU | 3706 |
| 2110 | AUCUAGCC A CCUGGGUG | 1198 | CACCCAGG CUGAUGAG GCCGUUAGGC CGAA IGCUAGAU | 3707 |
| 2112 | CUAGCCAC C UGGGUGGG | 1199 | CCCACCCA CUGAUGAG GCCGUUAGGC CGAA IUGGCUAG | 3708 |
| 2113 | UAGCCACC U GGGUGGGA | 1200 | UCCCACCC CUGAUGAG GCCGUUAGGC CGAA IGUGGCUA | 3709 |
| 2138 | GGAAGAUC C AGCAUCCA | 1201 | UGGAUGCU CUGAUGAG GCCGUUAGGC CGAA IAUCUUCC | 3710 |
| 2139 | GAAGAUCC A GCAUCCAG | 1202 | CUGGAUGC CUGAUGAG GCCGUUAGGC CGAA IGAUCUUC | 3711 |
| 2142 | GAUCCAGC A UCCAGGGA | 1203 | UCCCUGGA CUGAUGAG GCCGUUAGGC CGAA ICUGGAUC | 3712 |
| 2145 | CCAGCAUC C AGGGAAUU | 1204 | AAUUCCCU CUGAUGAG GCCGUUAGGC CGAA IAUGCUGG | 3713 |
| 2146 | CAGCAUCC A GGGAAUUA | 1205 | UAAUUCCC CUGAUGAG GCCGUUAGGC CGAA IGAUGCUG | 3714 |
| 2161 | UAGUAGUC A GCUAUGUC | 1206 | GACAUAGC CUGAUGAG GCCGUUAGGC CGAA IACUACUA | 3715 |
| 2164 | UAGUCAGC U AUGUCAAC | 1207 | GUUGACAU CUGAUGAG GCCGUUAGGC CGAA ICUGACUA | 3716 |
| 2170 | GCUAUGUC A ACGUUAAU | 1208 | AUUAACGU CUGAUGAG GCCGUUAGGC CGAA IACAUAGC | 3717 |
| 2185 | AUAUGGGC C UAAAAAUC | 1209 | GAUUUUUA CUGAUGAG GCCGUUAGGC CGAA ICCCAUAU | 3718 |
| 2186 | UAUGGGCC U AAAAAUCA | 1210 | UGAUUUUU CUGAUGAG GCCGUUAGGC CGAA IGCCCAUA | 3719 |
| 2194 | UAAAAAUC A GACAACUA | 1211 | UAGUUGUC CUGAUGAG GCCGUUAGGC CGAA IAUUUUUA | 3720 |
| 2198 | AAUCAGAC A ACUAUUGU | 1212 | ACAAUAGU CUGAUGAG GCCGUUAGGC CGAA IUCUGAUU | 3721 |
| 2201 | CAGACAAC U AUUGUGGU | 1213 | ACCACAAU CUGAUGAG GCCGUUAGGC CGAA IUUGUCUG | 3722 |
| 2213 | GUGGUUUC A CAUUUCCU | 1214 | AGGAAAUG CUGAUGAG GCCGUUAGGC CGAA IAAACCAC | 3723 |
| 2215 | GGUUUCAC A UUUCCUGU | 1215 | ACAGGAAA CUGAUGAG GCCGUUAGGC CGAA IUGAAACC | 3724 |
| 2220 | CACAUUUC C UGUCUUAC | 1216 | GUAAGACA CUGAUGAG GCCGUUAGGC CGAA IAAAUGUG | 3725 |
| 2221 | ACAUUUCC U GUCUUACU | 1217 | AGUAAGAC CUGAUGAG GCCGUUAGGC CGAA IGAAAUGU | 3726 |
| 2225 | UUCCUGUC U UACUUUUG | 1218 | CAAAAGUA CUGAUGAG GCCGUUAGGC CGAA IACAGGAA | 3727 |
| 2229 | UGUCUUAC U UUUGGGCG | 1219 | CGCCCAAA CUGAUGAG GCCGUUAGGC CGAA IUAAGACA | 3728 |
| 2244 | CGAGAAAC U GUUCUUGA | 1220 | UCAAGAAC CUGAUGAG GCCGUUAGGC CGAA IUUUCUCG | 3729 |
| 2249 | AACUGUUC U UGAAUAUU | 1221 | AAUAUUCA CUGAUGAG GCCGUUAGGC CGAA IAACAGUU | 3730 |
| 2265 | UUGGUGUC U UUUGGAGU | 1222 | ACUCCAAA CUGAUGAG GCCGUUAGGC CGAA IACACCAA | 3731 |
| 2284 | GGAUUCGC A CUCCUCCU | 1223 | AGGAGGAG CUGAUGAG GCCGUUAGGC CGAA ICGAAUCC | 3732 |
| 2286 | AUUCGCAC U CCUCCUGC | 1224 | GCAGGAGG CUGAUGAG GCCGUUAGGC CGAA IUGCGAAU | 3733 |
| 2288 | UCGCACUC C UCCUGCAU | 1225 | AUGCAGGA CUGAUGAG GCCGUUAGGC CGAA IAGUGCGA | 3734 |
| 2289 | CGCACUCC U CCUGCAUA | 1226 | UAUGCAGG CUGAUGAG GCCGUUAGGC CGAA IGAGUGCG | 3735 |
| 2291 | CACUCCUC C UGCAUAUA | 1227 | UAUAUGCA CUGAUGAG GCCGUUAGGC CGAA IAGGAGUG | 3736 |
| 2292 | ACUCCUCC U GCAUAUAG | 1228 | CUAUAUGC CUGAUGAG GCCGUUAGGC CGAA IGAGGAGU | 3737 |
| 2295 | CCUCCUGC A UAUAGACC | 1229 | GGUCUAUA CUGAUGAG GCCGUUAGGC CGAA ICAGGAGG | 3738 |
| 2303 | AUAUAGAC C ACCAAAUG | 1230 | CAUUUGGU CUGAUGAG GCCGUUAGGC CGAA IUCUAUAU | 3739 |
| 2304 | UAUAGACC A CCAAAUGC | 1231 | GCAUUUGG CUGAUGAG GCCGUUAGGC CGAA IGUCUAUA | 3740 |
| 2306 | UAGACCAC C AAAUGCCC | 1232 | GGGCAUUU CUGAUGAG GCCGUUAGGC CGAA IUGGUCUA | 3741 |
| 2307 | AGACCACC A AAUGCCCC | 1233 | GGGGCAUU CUGAUGAG GCCGUUAGGC CGAA IGUGGUCU | 3742 |
| 2313 | CCAAAUGC C CCUAUCUU | 1234 | AAGAUAGG CUGAUGAG GCCGUUAGGC CGAA ICAUUUGG | 3743 |
| 2314 | CAAAUGCC C CUAUCUUA | 1235 | UAAGAUAG CUGAUGAG GCCGUUAGGC CGAA IGCAUUUG | 3744 |
| 2315 | AAAUGCCC C UAUCUUAU | 1236 | AUAAGAUA CUGAUGAG GCCGUUAGGC CGAA IGGCAUUU | 3745 |
| 2316 | AAUGCCCC U AUCUUAUC | 1237 | GAUAAGAU CUGAUGAG GCCGUUAGGC CGAA IGGGCAUU | 3746 |
| 2320 | CCCCUAUC U UAUCAACA | 1238 | UGUUGAUA CUGAUGAG GCCGUUAGGC CGAA IAUAGGGG | 3747 |
| 2325 | AUCUUAUC A ACACUUCC | 1239 | GGAAGUGU CUGAUGAG GCCGUUAGGC CGAA IAUAAGAU | 3748 |
| 2328 | UUAUCAAC A CUUCCGGA | 1240 | UCCGGAAG CUGAUGAG GCCGUUAGGC CGAA IUUGAUAA | 3749 |
| 2330 | AUCAACAC U UCCGGAAA | 1241 | UUUCCGGA CUGAUGAG GCCGUUAGGC CGAA IUGUUGAU | 3750 |
| 2333 | AACACUUC C GGAAACUA | 1242 | UAGUUUCC CUGAUGAG GCCGUUAGGC CGAA IAAGUGUU | 3751 |
| 2340 | CCGGAAAC U ACUGUUGU | 1243 | ACAACAGU CUGAUGAG GCCGUUAGGC CGAA IUUUCCGG | 3752 |
| 2343 | GAAACUAC U GUUGUUAG | 1244 | CUAACAAC CUGAUGAG GCCGUUAGGC CGAA IUAGUUUC | 3753 |
| 2362 | GAAGAGGC A GGUCCCCU | 1245 | AGGGGACC CUGAUGAG GCCGUUAGGC CGAA ICCUCUUC | 3754 |
| 2367 | GGCAGGUC C CCUAGAAG | 1246 | CUUCUAGG CUGAUGAG GCCGUUAGGC CGAA IACCUGCC | 3755 |
| 2368 | GCAGGUCC C CUAGAAGA | 1247 | UCUUCUAG CUGAUGAG GCCGUUAGGC CGAA IGACCUGC | 3756 |
| 2369 | CAGGUCCC C UAGAAGAA | 1248 | UUCUUCUA CUGAUGAG GCCGUUAGGC CGAA IGGACCUG | 3757 |
| 2370 | AGGUCCCC U AGAAGAAG | 1249 | CUUCUUCU CUGAUGAG GCCGUUAGGC CGAA IGGGACCU | 3758 |
| 2382 | AGAAGAAC U CCCUCGCC | 1250 | GGCGAGGG CUGAUGAG GCCGUUAGGC CGAA IUUCUUCU | 3759 |
| 2384 | AAGAACUC C CUCGCCUC | 1251 | GAGGCGAG CUGAUGAG GCCGUUAGGC CGAA IAGUUCUU | 3760 |
| 2385 | AGAACUCC C UCGCCUCG | 1252 | CGAGGCGA CUGAUGAG GCCGUUAGGC CGAA IGAGUUCU | 3761 |
| 2386 | GAACUCCC U CGCCUCGC | 1253 | GCGAGGCG CUGAUGAG GCCGUUAGGC CGAA IGGAGUUC | 3762 |
| 2390 | UCCCUCGC C UCGCAGAC | 1254 | GUCUGCGA CUGAUGAG GCCGUUAGGC CGAA ICGAGGGA | 3763 |
| 2391 | CCCUCGCC U CGCAGACG | 1255 | CGUCUGCG CUGAUGAG GCCGUUAGGC CGAA IGCGAGGG | 3764 |
| 2395 | CGCCUCGC A GACGAAGG | 1256 | CCUUCGUC CUGAUGAG GCCGUUAGGC CGAA ICGAGGCG | 3765 |
| 2406 | CGAAGGUC U CAAUCGCC | 1257 | GGCGAUUG CUGAUGAG GCCGUUAGGC CGAA IACCUUCG | 3766 |
| 2408 | AAGGUCUC A AUCGCCGC | 1258 | GCGGCGAU CUGAUGAG GCCGUUAGGC CGAA IAGACCUU | 3767 |
| 2414 | UCAAUCGC C GCGUCGCA | 1259 | UGCGACGC CUGAUGAG GCCGUUAGGC CGAA ICGAUUGA | 3768 |
| 2422 | CGCGUCGC A GAAGAUCU | 1260 | AGAUCUUC CUGAUGAG GCCGUUAGGC CGAA ICGACGCG | 3769 |
| 2430 | AGAAGAUC U CAAUCUCG | 1261 | CGAGAUUG CUGAUGAG GCCGUUAGGC CGAA IAUCUUCU | 3770 |
| 2432 | AAGAUCUC A AUCUCGGG | 1262 | CCCGAGAU CUGAUGAG GCCGUUAGGC CGAA IAGAUCUU | 3771 |
| 2436 | UCUCAAUC U CGGGAAUC | 1263 | GAUUCCCG CUGAUGAG GCCGUUAGGC CGAA IAUUGAGA | 3772 |
| 2445 | CGGGAAUC U CAAUGUUA | 1264 | UAACAUUG CUGAUGAG GCCGUUAGGC CGAA IAUUCCCG | 3773 |
| 2447 | GGAAUCUC A AUGUUAGU | 1265 | ACUAACAU CUGAUGAG GCCGUUAGGC CGAA IAGAUUCC | 3774 |
| 2460 | UAGUAUUC C UUGGACAC | 1266 | GUGUCCAA CUGAUGAG GCCGUUAGGC CGAA IAAUACUA | 3775 |
| 2461 | AGUAUUCC U UGGACACA | 1267 | UGUGUCCA CUGAUGAG GCCGUUAGGC CGAA IGAAUACU | 3776 |
| 2467 | CCUUGGAC A CAUAAGGU | 1268 | ACCUUAUG CUGAUGAG GCCGUUAGGC CGAA IUCCAAGG | 3777 |
| 2469 | UUGGACAC A UAAGGUGG | 1269 | CCACCUUA CUGAUGAG GCCGUUAGGC CGAA IUGUCCAA | 3778 |
| 2483 | UGGGAAAC U UUACGGGG | 1270 | CCCCGUAA CUGAUGAG GCCGUUAGGC CGAA IUUUCCCA | 3779 |
| 2493 | UACGGGGC U UUAUUCUU | 1271 | AAGAAUAA CUGAUGAG GCCGUUAGGC CGAA ICCCCGUA | 3780 |
| 2500 | CUUUAUUC U UCUACGGU | 1272 | ACCGUAGA CUGAUGAG GCCGUUAGGC CGAA IAAUAAAG | 3781 |
| 2503 | UAUUCUUC U ACGGUACC | 1273 | GGUACCGU CUGAUGAG GCCGUUAGGC CGAA IAAGAAUA | 3782 |
| 2511 | UACGGUAC C UUGCUUUA | 1274 | UAAAGCAA CUGAUGAG GCCGUUAGGC CGAA IUACCGUA | 3783 |
| 2512 | ACGGUACC U UGCUUUAA | 1275 | UUAAAGCA CUGAUGAG GCCGUUAGGC CGAA IGUACCGU | 3784 |
| 2516 | UACCUUGC U UUAAUCCU | 1276 | AGGAUUAA CUGAUGAG GCCGUUAGGC CGAA ICAAGGUA | 3785 |
| 2523 | UUUUAAUC C UAAAUGGC | 1277 | GCCAUUUA CUGAUGAG GCCGUUAGGC CGAA IAUUAAAG | 3786 |
| 2524 | UUUAAUCC U AAAUGGCA | 1278 | UGCCAUUU CUGAUGAG GCCGUUAGGC CGAA IGAUUAAA | 3787 |
| 2532 | UAAAUGGC A AACUCCUU | 1279 | AAGGAGUU CUGAUGAG GCCGUUAGGC CGAA ICCAUUUA | 3788 |
| 2536 | UGGCAAAC U CCUUCUUU | 1280 | AAAGAAGG CUGAUGAG GCCGUUAGGC CGAA IUUUGCCA | 3789 |
| 2538 | GCAAACUC C UUCUUUUC | 1281 | GAAAAGAA CUGAUGAG GCCGUUAGGC CGAA IAGUUUGC | 3790 |
| 2539 | CAAACUCC U UCUUUUCC | 1282 | GGAAAAGA CUGAUGAG GCCGUUAGGC CGAA IGAGUUUG | 3791 |
| 2542 | ACUCCUUC U UUUCCUGA | 1283 | UCAGGAAA CUGAUGAG GCCGUUAGGC CGAA IAAGGAGU | 3792 |
| 2547 | UUCUUUUC C UGACAUUC | 1284 | GAAUGUCA CUGAUGAG GCCGUUAGGC CGAA IAAAAGAA | 3793 |
| 2548 | UCUUUUCC U GACAUUCA | 1285 | UGAAUGUC CUGAUGAG GCCGUUAGGC CGAA IGAAAAGA | 3794 |
| 2552 | UUCCUGAC A UUCAUUUG | 1286 | CAAAUGAA CUGAUGAG GCCGUUAGGC CGAA IUCAGGAA | 3795 |
| 2556 | UGACAUUC A UUUGCAGG | 1287 | CCUGCAAA CUGAUGAG GCCGUUAGGC CGAA IAAUGUCA | 3796 |
| 2562 | UCAUUUGC A GGAGGACA | 1288 | UGUCCUCC CUGAUGAG GCCGUUAGGC CGAA ICAAAUGA | 3797 |
| 2570 | AGGAGGAC A UUGUUGAU | 1289 | AUCAACAA CUGAUGAG GCCGUUAGGC CGAA IUCCUCCU | 3798 |
| 2589 | AUGUAAGC A AUUUGUGG | 1290 | CCACAAAU CUGAUGAG GCCGUUAGGC CGAA ICUUACAU | 3799 |
| 2601 | UGUGGGGC C CCUUACAG | 1291 | CUGUAAGG CUGAUGAG GCCGUUAGGC CGAA ICCCCACA | 3800 |
| 2602 | GUGGGGCC C CUUACAGU | 1292 | ACUGUAAG CUGAUGAG GCCGUUAGGC CGAA IGCCCCAC | 3801 |
| 2603 | UGGGGCCC C UUACAGUA | 1293 | UACUGUAA CUGAUGAG GCCGUUAGGC CGAA IGGCCCCA | 3802 |
| 2604 | GGGGCCCC U UACAGUAA | 1294 | UUACUGUA CUGAUGAG GCCGUUAGGC CGAA IGGGCCCC | 3803 |
| 2608 | CCCCUUAC A GUAAAUGA | 1295 | UCAUUUAC CUGAUGAG GCCGUUAGGC CGAA IUAAGGGG | 3804 |
| 2621 | AUGAAAAC A GGAGACUU | 1296 | AAGUCUCC CUGAUGAG GCCGUUAGGC CGAA IUUUUCAU | 3805 |
| 2628 | CAGGAGAC U UAAAUUAA | 1297 | UUAAUUUA CUGAUGAG GCCGUUAGGC CGAA IUCUCCUG | 3806 |
| 2638 | AAAUUAAC U AUGCCUGC | 1298 | GCAGGCAU CUGAUGAG GCCGUUAGGC CGAA IUUAAUUU | 3807 |
| 2643 | AACUAUGC C UGCUAGGU | 1299 | ACCUAGCA CUGAUGAG GCCGUUAGGC CGAA ICAUAGUU | 3808 |
| 2644 | ACUAUGCC U GCUAGGUU | 1300 | AACCUAGC CUGAUGAG GCCGUUAGGC CGAA IGCAUAGU | 3809 |
| 2647 | AUGCCUGC U AGGUUUUA | 1301 | UAAAACCU CUGAUGAG GCCGUUAGGC CGAA ICAGGCAU | 3810 |
| 2658 | GUUUUAUC C CAAUGUUA | 1302 | UAACAUUG CUGAUGAG GCCGUUAGGC CGAA IAUAAAAC | 3811 |
| 2659 | UUUUAUCC C AAUGUUAC | 1303 | GUAACAUU CUGAUGAG GCCGUUAGGC CGAA IGAUAAAA | 3812 |
| 2660 | UUUAUCCC A AUGUUACU | 1304 | AGUAACAU CUGAUGAG GCCGUUAGGC CGAA IGGAUAAA | 3813 |
| 2668 | AAUGUUAC U AAAUAUUU | 1305 | AAAUAUUU CUGAUGAG GCCGUUAGGC CGAA IUAACAUU | 3814 |
| 2679 | AUAUUUGC C CUUAGAUA | 1306 | UAUCUAAG CUGAUGAG GCCGUUAGGC CGAA ICAAAUAU | 3815 |
| 2680 | UAUUUGCC C UUAGAUAA | 1307 | UUAUCUAA CUGAUGAG GCCGUUAGGC CGAA IGCAAAUA | 3816 |
| 2681 | AUUUGCCC U UAGAUAAA | 1308 | UUUAUCUA CUGAUGAG GCCGUUAGGC CGAA IGGCAAAU | 3817 |
| 2696 | AAGGGAUC A AACCGUAU | 1309 | AUACCGUU CUGAUGAG GCCGUUAGGC CGAA IAUCCCUU | 3818 |
| 2700 | GAUCAAAC C GUAUUAUC | 1310 | GAUAAUAC CUGAUGAG GCCGUUAGGC CGAA IUUUGAUC | 3819 |
| 2709 | GUAUUAUC C AGAGUAUG | 1311 | CAUACUCU CUGAUGAG GCCGUUAGGC CGAA IAUAAUAC | 3820 |
| 2710 | UAUUAUCC A GAGUAUGU | 1312 | ACAUACUC CUGAUGAG GCCGUUAGGC CGAA IGAUAAUA | 3821 |
| 2727 | AGUUAAUC A UUACUUCC | 1313 | GGAAGUAA CUGAUGAG GCCGUUAGGC CGAA IAUUAACU | 3822 |
| 2732 | AUCAUUAC U UCCAGACG | 1314 | CGUCUGGA CUGAUGAG GCCGUUAGGC CGAA IUAAUGAU | 3823 |
| 2735 | AUUACUUC C AGACGCGA | 1315 | UCGCGUCU CUGAUGAG GCCGUUAGGC CGAA IAAGUAAU | 3824 |
| 2736 | UUACUUCC A GACGCGAC | 1316 | GUCGCGUC CUGAUGAG GCCGUUAGGC CGAA IGAAGUAA | 3825 |
| 2745 | GACGCGAC A UUAUUUAC | 1317 | GUAAAUAA CUGAUGAG GCCGUUAGGC CGAA IUCGCGUC | 3826 |
| 2754 | UUAUUUAC A CACUCUUU | 1318 | AAAGAGUG CUGAUGAG GCCGUUAGGC CGAA IUAAAUAA | 3827 |
| 2756 | AUUUACAC A CUCUUUGG | 1319 | CCAAAGAG CUGAUGAG GCCGUUAGGC CGAA IUGUAAAU | 3828 |
| 2758 | UUACACAC U CUUUGGAA | 1320 | UUCCAAAG CUGAUGAG GCCGUUAGGC CGAA IUGUGUAA | 3829 |
| 2760 | ACACACUC U UUGGAAGG | 1321 | CCUUCCAA CUGAUGAG GCCGUUAGGC CGAA IAGUGUGU | 3830 |
| 2777 | CGGGGAUC U UAUAUAAA | 1322 | UUUAUAUA CUGAUGAG GCCGUUAGGC CGAA IAUCCCCG | 3831 |
| 2794 | AGAGAGUC C ACACGUAG | 1323 | UUACGUGU CUGAUGAG GCCGUUAGGC CGAA IACUCUCU | 3832 |
| 2795 | GAGAGUCC A CACGUAGC | 1324 | GCUACGUG CUGAUGAG GCCGUUAGGC CGAA IGACUCUC | 3833 |
| 2797 | GAGUCCAC A CGUAGCGC | 1325 | GCGCUACG CUGAUGAG GCCGUUAGGC CGAA IUGGACUC | 3834 |
| 2806 | CGUAGCGC C UCAUUUUG | 1326 | CAAAAUGA CUGAUGAG GCCGUUAGGC CGAA ICGCUACG | 3835 |
| 2807 | GUAGCGCC U CAUUUUGC | 1327 | GCAAAAUG CUGAUGAG GCCGUUAGGC CGAA IGCGCUAC | 3836 |
| 2809 | AGCGCCUC A UUUUGCGG | 1328 | CCGCAAAA CUGAUGAG GCCGUUAGGC CGAA IAGGCGCU | 3837 |
| 2821 | UGCGGGUC A CCAUAUUC | 1329 | GAAUAUGG CUGAUGAG GCCGUUAGGC CGAA IACCCGCA | 3838 |
| 2823 | UGGGUCAC C AUAUUCUU | 1330 | AAGAAUAU CUGAUGAG GCCGUUAGGC CGAA IUGACCCG | 3839 |
| 2824 | GGGUCACC A UAUUCUUG | 1331 | CAAGAAUA CUGAUGAG GCCGUUAGGC CGAA IGUGACCC | 3840 |
| 2830 | CCAUAUUC U UGGGAACA | 1332 | UGUUCCCA CUGAUGAG GCCGUUAGGC CGAA IAAUAUGG | 3841 |
| 2838 | UUGGGAAC A AGAUCUAC | 1333 | GUAGAUCU CUGAUGAG GCCGUUAGGC CGAA IUUCCCAA | 3842 |
| 2844 | ACAAGAUC U ACAGCAUG | 1334 | CAUGCUGU CUGAUGAG GCCGUUAGGC CGAA IAUCUUGU | 3843 |
| 2847 | AGAUCUAC A GCAUGGGA | 1335 | UCCCAUGC CUGAUGAG GCCGUUAGGC CGAA IUAGAUCU | 3844 |
| 2850 | UCUACAGC A UGGGAGGU | 1336 | ACCUCCCA CUGAUGAG GCCGUUAGGC CGAA ICUGUAGA | 3845 |
| 2864 | GGUUGGUC U UCCAAACC | 1337 | GGUUUGGA CUGAUGAG GCCGUUAGGC CGAA IACCAACC | 3846 |
| 2867 | UGGUCUUC C AAACCUCG | 1338 | CGAGGUUU CUGAUGAG GCCGUUAGGC CGAA IAAGACCA | 3847 |
| 2868 | GGUCUUCC A AACCUCGA | 1339 | UCGAGGUU CUGAUGAG GCCGUUAGGC CGAA IGAAGACC | 3848 |
| 2872 | UUCCAAAC C UCGAAAAG | 1340 | CUUUUCGA CUGAUGAG GCCGUUAGGC CGAA IUUUGGAA | 3849 |
| 2873 | UCCAAACC U CGAAAAGG | 1341 | CCUUUUCG CUGAUGAG GCCGUUAGGC CGAA IGUUUGGA | 3850 |
| 2883 | GAAAAGGC A UGGGGACA | 1342 | UGUCCCCA CUGAUGAG GCCGUUAGGC CGAA ICCUUUUC | 3851 |
| 2891 | AUGGGGAC A AAUCUUUC | 1343 | GAAAGAUU CUGAUGAG GCCGUUAGGC CGAA IUCCCCAU | 3852 |
| 2896 | GACAAAUC U UUCUGUCC | 1344 | GGACAGAA CUGAUGAG GCCGUUAGGC CGAA IAUUUGUC | 3853 |
| 2900 | AAUCUUUC U GUCCCCAA | 1345 | UUGGGGAC CUGAUGAG GCCGUUAGGC CGAA IAAAGAUU | 3854 |
| 2904 | UUUCUGUC C CCAAUCCC | 1346 | GGGAUUGG CUGAUGAG GCCGUUAGGC CGAA IACAGAAA | 3855 |
| 2905 | UUCUGUCC C CAAUCCCC | 1347 | GGGGAUUG CUGAUGAG GCCGUUAGGC CGAA IGACAGAA | 3856 |
| 2906 | UCUGUCCC C AAUCCCCU | 1348 | AGGGGAUU CUGAUGAG GCCGUUAGGC CGAA IGGACAGA | 3857 |
| 2907 | CUGUCCCC A AUCCCCUG | 1349 | CAGGGGAU CUGAUGAG GCCGUUAGGC CGAA IGGGACAG | 3858 |
| 2911 | CCCCAAUC C CCUGGGAU | 1350 | AUCCCAGG CUGAUGAG GCCGUUAGGC CGAA IAUUGGGG | 3859 |
| 2912 | CCCAAUCC C CUGGGAUU | 1351 | AAUCCCAG CUGAUGAG GCCGUUAGGC CGAA IGAUUGGG | 3860 |
| 2913 | UCAAUCCC C UGGGAUUC | 1352 | GAAUCCCA CUGAUGAG GCCGUUAGGC CGAA IGGAUUGG | 3861 |
| 2914 | CAAUCCCC U GGGAUUCU | 1353 | AGAAUCCC CUGAUGAG GCCGUUAGGC CGAA IGGGAUUG | 3862 |
| 2922 | UGGGAUUC U UCCCCGAU | 1354 | AUCGGGGA CUGAUGAG GCCGUUAGGC CGAA IAAUCCCA | 3863 |
| 2925 | GAUUCUUC C CCGAUCAU | 1355 | AUGAUCGG CUGAUGAG GCCGUUAGGC CGAA IAAGAAUC | 3864 |
| 2926 | AUUCUUCC C CGAUCAUC | 1356 | GAUGAUCG CUGAUGAG GCCGUUAGGC CGAA IGAAGAAU | 3865 |
| 2927 | UUCUUCCC C GAUCAUCA | 1357 | UGAUGAUC CUGAUGAG GCCGUUAGGC CGAA IGGAAGAA | 3866 |
| 2932 | CCCCGAUC A UCAGUUGG | 1358 | CCAACUGA CUGAUGAG GCCGUUAGGC CGAA IAUCGGGG | 3867 |
| 2935 | CGAUCAUC A GUUGGACC | 1359 | GGUCCAAC CUGAUGAG GCCGUUAGGC CGAA IAUGAUCG | 3868 |
| 2943 | AGUUGGAC C CUGCAUUC | 1360 | GAAUGCAG CUGAUGAG GCCGUUAGGC CGAA IUCCAACU | 3869 |
| 2944 | GUUGGACC C UGCAUUCA | 1361 | UGAAUGCA CUGAUGAG GCCGUUAGGC CGAA IGUCCAAC | 3870 |
| 2945 | UUGGACCC U GCAUUCAA | 1362 | UUGAAUGC CUGAUGAG GCCGUUAGGC CGAA IGGUCCAA | 3871 |
| 2948 | GACCCUGC A UUCAAAGC | 1363 | GCUUUGAA CUGAUGAG GCCGUUAGGC CGAA ICAUGGUC | 3872 |
| 2952 | CUGCAUUC A AAGCCAAC | 1364 | GUUGGCUU CUGAUGAG GCCGUUAGGC CGAA IAAUGCAG | 3873 |
| 2957 | UUCAAAGC C AACUCAGU | 1365 | ACUGAGUU CUGAUGAG GCCGUUAGGC CGAA ICUUUGAA | 3874 |
| 2958 | UCAAAGCC A ACUCAGUA | 1366 | UACUGAGU CUGAUGAG GCCGUUAGGC CGAA IGCUUUGA | 3875 |
| 2961 | AAGCCAAC U CAGUAAAU | 1367 | AUUUACUG CUGAUGAG GCCGUUAGGC CGAA IUUGGCUU | 3876 |
| 2963 | GCCAACUC A GUAAAUCC | 1368 | GGAUUUAC CUGAUGAG GCCGUUAGGC CGAA IAGUUGGC | 3877 |
| 2971 | AGUAAAUC C AGAUUGGG | 1369 | CCCAAUCU CUGAUGAG GCCGUUAGGC CGAA IAUUUACU | 3878 |
| 2972 | GUAAAUCC A GAUUGGGA | 1370 | UCCCAAUC CUGAUGAG GCCGUUAGGC CGAA IGAUUUAC | 3879 |
| 2982 | AUUGGGAC C UCAACCCG | 1371 | CGGGUUGA CUGAUGAG GCCGUUAGGC CGAA IUCCCAAU | 3880 |
| 2983 | UUGGGACC U CAACCCGC | 1372 | GCGGGUUG CUGAUGAG GCCGUUAGGC CGAA IGUCCCAA | 3881 |
| 2985 | GGGACCUC A ACCCGCAC | 1373 | GUGCGGGU CUGAUGAG GCCGUUAGGC CGAA IAGGUCCC | 3882 |
| 2988 | ACCUCAAC C CGCACAAG | 1374 | CUUGUGCG CUGAUGAG GCCGUUAGGC CGAA IUUGAGGU | 3883 |
| 2989 | CCUCAACC C GCACAAGG | 1375 | CCUUGUGC CUGAUGAG GCCGUUAGGC CGAA IGUUGAGG | 3884 |
| 2992 | CAACCCGC A CAAGGACA | 1376 | UGUCCUUG CUGAUGAG GCCGUUAGGC CGAA ICGGGUUG | 3885 |
| 2994 | ACCCGCAC A AGGACAAC | 1377 | GUUGUCCU CUGAUGAG GCCGUUAGGC CGAA IUGCGGGU | 3886 |
| 3000 | ACAAGGAC A ACUGGCCG | 1378 | CGGCCAGU CUGAUGAG GCCGUUAGGC CGAA IUCCUUGU | 3887 |
| 3003 | AGGACAAC U GGCCGGAC | 1379 | GUCCGGCC CUGAUGAG GCCGUUAGGC CGAA IUUGUCCU | 3888 |
| 3007 | CAACUGGC C GGACGCCA | 1380 | UGGCGUCC CUGAUGAG GCCGUUAGGC CGAA ICCAGUUG | 3889 |
| 3014 | CCGGACGC C AACAAGGU | 1381 | ACCUUGUU CUGAUGAG GCCGUUAGGC CGAA ICGUCCGG | 3890 |
| 3015 | CGGACGCC A ACAAGGUG | 1382 | CACCUUGU CUGAUGAG GCCGUUAGGC CGAA IGCGUCCG | 3891 |
| 3018 | ACGCCAAC A AGGUGGGA | 1383 | UCCCACCU CUGAUGAG GCCGUUAGGC CGAA IUUGGCGU | 3892 |
| 3035 | GUGGGAGC A UUCGGGCC | 1384 | GGCCCGAA CUGAUGAG GCCGUUAGGC CGAA ICUCCCAC | 3893 |
| 3043 | AUUCGGGC C AGGGUUCA | 1385 | UGAACCCU CUGAUGAG GCCGUUAGGC CGAA ICCCGAAU | 3894 |
| 3044 | UUCGGGCC A GGGUUCAC | 1386 | GUGAACCC CUGAUGAG GCCGUUAGGC CGAA IGCCCGAA | 3895 |
| 3051 | CAGGGUUC A CCCCUCCC | 1387 | GGGAGGGG CUGAUGAG GCCGUUAGGC CGAA IAACCCUG | 3896 |
| 3053 | GGGUUCAC C CCUCCCCA | 1388 | UGGGGAGG CUGAUGAG GCCGUUAGGC CGAA IUGAACCC | 3897 |
| 3054 | GGUUCACC C CUCCCCAU | 1389 | AUGGGGAG CUGAUGAG GCCGUUAGGC CGAA IGUGAACC | 3898 |
| 3055 | GUUCACCC C UCCCCAUG | 1390 | CAUGGGGA CUGAUGAG GCCGUUAGGC CGAA IGGUGAAC | 3899 |
| 3056 | UUCACCCC U CCCCAUGG | 1391 | CCAUGGGG CUGAUGAG GCCGUUAGGC CGAA IGGGUGAA | 3900 |
| 3058 | CACCCCUC C CCAUGGGG | 1392 | CCCCAUGG CUGAUGAG GCCGUUAGGC CGAA IAGGGGUG | 3901 |
| 3059 | ACCCCUCC C CAUGGGGG | 1393 | UCCCCAUG CUGAUGAG GCCGUUAGGC CGAA IGAGGGGU | 3902 |
| 3060 | CCCCUCCC C AUGGGGGA | 1394 | UCCCCCAU CUGAUGAG GCCGUUAGGC CGAA IGGAGGGG | 3903 |
| 3061 | CCCUCCCC A UGGGGGAC | 1395 | GUCCCCCA CUGAUGAG GCCGUUAGGC CGAA IGGGAGGG | 3904 |
| 3070 | UGGGGGAC U GUUGGGGU | 1396 | ACCCCAAC CUGAUGAG GCCGUUAGGC CGAA IUCCCCCA | 3905 |
| 3084 | GGUGGAGC C CUCACGCU | 1397 | AGCGUGAG CUGAUGAG GCCGUUAGGC CGAA ICUCCACC | 3906 |
| 3085 | GUGGAGCC C UCACGCUC | 1398 | GAGCGUGA CUGAUGAG GCCGUUAGGC CGAA IGCUCCAC | 3907 |
| 3086 | UGGAGCCC U CACGCUCA | 1399 | UGAGCGUG CUGAUGAG GCCGUUAGGC CGAA IGGCUCCA | 3908 |
| 3088 | GAGCCCUC A CGCUCAGG | 1400 | CCUGAGCG CUGAUGAG GCCGUUAGGC CGAA IAGGGCUC | 3909 |
| 3092 | CCUCACGC U CAGGGCCU | 1401 | AGGCCCUG CUGAUGAG GCCGUUAGGC CGAA ICGUGAGG | 3910 |
| 3094 | UCACGCUC A GGGCCUAC | 1402 | GUAGGCCC CUGAUGAG GCCGUUAGGC CGAA IAGCGUGA | 3911 |
| 3099 | CUCAGGGC C UACUCACA | 1403 | UGUGAGUA CUGAUGAG GCCGUUAGGC CGAA ICCCUGAG | 3912 |
| 3100 | UCAGGGCC U ACUCACAA | 1404 | UUGUGAGU CUGAUGAG GCCGUUAGGC CGAA IGCCCUGA | 3913 |
| 3103 | GGGCCUAC U CACAACUG | 1405 | CAGUUGUG CUGAUGAG GCCGUUAGGC CGAA IUAGGCCC | 3914 |
| 3105 | GCCUACUC A CAACUGUG | 1406 | CACAGUUG CUGAUGAG GCCGUUAGGC CGAA IAGUAGGC | 3915 |
| 3107 | CUACUCAC A ACUGUGCC | 1407 | GGCACAGU CUGAUGAG GCCGUUAGGC CGAA IUGAGUAG | 3916 |
| 3110 | CUCACAAC U GUGCCAGC | 1408 | GCUGGCAC CUGAUGAG GCCGUUAGGC CGAA IUUGUGAG | 3917 |
| 3115 | AACUGUGC C AGCAGCUC | 1409 | GAGCUGCU CUGAUGAG GCCGUUAGGC CGAA ICACAGUU | 3918 |
| 3116 | ACUGUGCC A GCAGCUCC | 1410 | GGAGCUGC CUGAUGAG GCCGUUAGGC CGAA IGCACAGU | 3919 |
| 3119 | GUGCCAGC A GCUCCUCC | 1411 | GGAGGAGC CUGAUGAG GCCGUUAGGC CGAA ICUGGCAC | 3920 |
| 3122 | CCAGCAGC U CCUCCUCC | 1412 | GGAGGAGG CUGAUGAG GCCGUUAGGC CGAA ICUGCUGG | 3921 |
| 3124 | AGCAGCUC C UCCUCCUG | 1413 | CAGGAGGA CUGAUGAG GCCGUUAGGC CGAA IAGCUGCU | 3922 |
| 3125 | GCAGCUCC U CCUCCUGC | 1414 | GCAGGAGG CUGAUGAG GCCGUUAGGC CGAA IGAGCUGC | 3923 |
| 3127 | AGCUCCUC C UCCUGCCU | 1415 | AGGCAGGA CUGAUGAG GCCGUUAGGC CGAA IAGGAGCU | 3924 |
| 3128 | GCUCCUCC U CCUGCCUC | 1416 | GAGGCAGG CUGAUGAG GCCGUUAGGC CGAA IGAGGAGC | 3925 |
| 3130 | UCCUCCUC C UGCCUCCA | 1417 | UGGAGGCA CUGAUGAG GCCGUUAGGC CGAA IAGGAGGA | 3926 |
| 3131 | CCUCCUCC U GCCUCCAC | 1418 | GUGGAGGC CUGAUGAG GCCGUUAGGC CGAA IGAGGAGG | 3927 |
| 3134 | CCUCCUGC C UCCACCAA | 1419 | UUGGUGGA CUGAUGAG GCCGUUAGGC CGAA ICAGGAGG | 3928 |
| 3135 | CUCCUGCC U CCACCAAU | 1420 | AUUGGUGG CUGAUGAG GCCGUUAGGC CGAA IGCAGGAG | 3929 |
| 3137 | CCUGCCUC C ACCAAUCG | 1421 | CGAUUGGU CUGAUGAG GCCGUUAGGC CGAA IAGGCAGG | 3930 |
| 3138 | CUGCCUCC A CCAAUCGG | 1422 | CCGAUUGG CUGAUGAG GCCGUUAGGC CGAA IGAGGCAG | 3931 |
| 3140 | GCCUCCAC C AAUCGGCA | 1423 | UGCCGAUU CUGAUGAG GCCGUUAGGC CGAA IUGGAGGC | 3932 |
| 3141 | CCUCCACC A AUCGGCAG | 1424 | CUGCCGAU CUGAUGAG GCCGUUAGGC CGAA IGUGGAGG | 3933 |
| 3148 | CAAUCGGC A GUCAGGAA | 1425 | UUCCUGAC CUGAUGAG GCCGUUAGGC CGAA ICCGAUUG | 3934 |
| 3152 | CGGCAGUC A GGAAGGCA | 1426 | UGCCUUCC CUGAUGAG GCCGUUAGGC CGAA IACUGCCG | 3935 |
| 3160 | AGGAAGGC A GCCUACUC | 1427 | GAGUAGGC CUGAUGAG GCCGUUAGGC CGAA ICCUUCCU | 3936 |
| 3163 | AAGGCAGC C UACUCCCU | 1428 | AGGGAGUA CUGAUGAG GCCGUUAGGC CGAA ICUGCCUU | 3937 |
| 3164 | AGGCAGCC U ACUCCCUU | 1429 | AAGGGAGU CUGAUGAG GCCGUUAGGC CGAA IGCUGCCU | 3938 |
| 3167 | CAGCCUAC U CCCUUAUC | 1430 | GAUAAGGG CUGAUGAG GCCGUUAGGC CGAA IUAGGCUG | 3939 |
| 3169 | GCCUACUC C CUUAUCUC | 1431 | GAGAUAAG CUGAUGAG GCCGUUAGGC CGAA IAGUAGGC | 3940 |
| 3170 | CCUACUCC C UUAUCUCC | 1432 | GGAGAUAA CUGAUGAG GCCGUUAGGC CGAA IGAGUAGG | 3941 |
| 3171 | CUACUCCC U UAUCUCCA | 1433 | UGGAGAUA CUGAUGAG GCCGUUAGGC CGAA IGGAGUAG | 3942 |
| 3176 | CCCUUAUC U CCACCUCU | 1434 | AGAGGUGG CUGAUGAG GCCGUUAGGC CGAA IAUAAGGG | 3943 |
| 3178 | CUUAUCUC C ACCUCUAA | 1435 | UUAGAGGU CUGAUGAG GCCGUUAGGC CGAA IAGAUAAG | 3944 |
| 3179 | UUAUCUCC A CCUCUAAG | 1436 | CUUAGAGG CUGAUGAG GCCGUUAGGC CGAA IGAGAUAA | 3945 |
| 3181 | AUCUCCAC C UCUAAGGG | 1437 | CCCUUAGA CUGAUGAG GCCGUUAGGC CGAA IUGGAGAU | 3946 |
| 3182 | UCUCCACC U CUAAGGGA | 1438 | UCCCUUAG CUGAUGAG GCCGUUAGGC CGAA IGUGGAGA | 3947 |
| 3184 | UCCACCUC U AAGGGACA | 1439 | UGUCCCUU CUGAUGAG GCCGUUAGGC CGAA IAGGUGGA | 3948 |
| 3192 | UAAGGGAC A CUCAUCCU | 1440 | AGGAUGAG CUGAUGAG GCCGUUAGGC CGAA IUCCCUUA | 3949 |
| 3194 | AGGGACAC U CAUCCUCA | 1441 | UGAGGAUG CUGAUGAG GCCGUUAGGC CGAA IUGUCCCU | 3950 |
| 3196 | GGACACUC A UCCUCAGG | 1442 | CCUGAGGA CUGAUGAG GCCGUUAGGC CGAA IAGUGUCC | 3951 |
| 3199 | CACUCAUC C UCAGGCCA | 1443 | UGGCCUGA CUGAUGAG GCCGUUAGGC CGAA IAUGAGUG | 3952 |
| 3200 | ACUCAUCC U CAGGCCAU | 1444 | AUGGCCUG CUGAUGAG GCCGUUAGGC CGAA IGAUGAGU | 3953 |
| 3202 | UCAUCCUC A GGCCAUGC | 1445 | GCAUGGCC CUGAUGAG GCCGUUAGGC CGAA IAGGAUGA | 3954 |
| 3206 | CCUCAGGC C AUGCAGUG | 1446 | CACUGCAU CUGAUGAG GCCGUUAGGC CGAA ICCUGAGG | 3955 |
| 3207 | CUCAGGCC A UGCAGUGG | 1447 | CCACUGCA CUGAUGAG GCCGUUAGGC CGAA IGCCUGAG | 3956 |

Input Sequence = AF100308.
Cut Site = UH/.
Stem Length = 8.
Core Sequence = CUGAUGAG GCCGUUAGGC CGAA
AF100308 (Hepatitis B virus strain 2-18, 3215 bp)
Underlined region can be any X sequence or linker, as described herein.
“I” stands for Inosine

[0250] TABLE VII
HUMAN HBV G-CLEAVER AND SUBSTRATE SEQUENCE

| Pos | Substrate | Seq ID | G-cleaver | Seq ID |
|---|---|---|---|---|
| 61 | ACUUUCCU G CUGGUGGC | 1448 | GCCACCAG UGAUG GCAUGCACUAUGC GCG AGGAAAGU | 3957 |
| 87 | GGAACAGU G AGCCCUGC | 1449 | GCAGGGCU UGAUG GCAUGCACUAUGC GCG ACUGUUCC | 3958 |
| 94 | UGAGCCCU G CUCAGAAU | 1450 | ACUCUGAG UGAUG GCAUGCACUAUGC GCG AGGGCUCA | 3959 |
| 112 | CUGUCUCU G CCAUAUCG | 1451 | CGAUAUGG UGAUG GCAUGCACUAUGC GCG AGAGACAG | 3960 |
| 132 | AUCUUAUC G AAGACUGG | 1452 | CCAGUCUU UGAUG GCAUGCACUAUGC GCG GAUAAGAU | 3961 |
| 153 | CCUGUACC G AACAUGGA | 1453 | UCCAUGUU UGAUG GCAUGCACUAUGC GCG GGUACAGG | 3962 |
| 169 | AGAACAUC G CAUCAGGA | 1454 | UCCUGAUG UGAUG GCAUGCACUAUGC GCG GAUGUUCU | 3963 |
| 192 | GGACCCCU G CUCGUGUU | 1455 | AACACGAG UGAUG GCAUGCACUAUGC GCG AGGGGUCC | 3964 |
| 222 | UUCUUGUU G ACAAAAAU | 1456 | AUUUUUGU UGAUG GCAUGCACUAUGC GCG AACAAGAA | 3965 |
| 315 | CAAAAUUC G CAGUCCCA | 1457 | UGGGACUG UGAUG GCAUGCACUAUGC GCG GAAUUUUG | 3966 |
| 374 | UGGUUAUC G CUGGAUCU | 1458 | ACAUCCAG UGAUG GCAUGCACUAUGC GCG GAUAACCA | 3967 |
| 387 | AUGUGUCU G CGGCGUUU | 1459 | AAACGCCG UGAUG GCAUGCACUAUGC GCG AGACACAU | 3968 |
| 410 | CUUCCUCU G CAUCCUGC | 1460 | GCAGGAUG UGAUG GCAUGCACUAUGC GCG AGAGGAAG | 3969 |
| 417 | UGCAUCCU G CUGCUAUG | 1461 | CAUAGCAG UGAUG GCAUGCACUAUGC GCG AGGAUGCA | 3970 |
| 420 | AUCCUGCU G CUAUGCCU | 1462 | AGGCAUAG UGAUG GCAUGCACUAUGC GCG AGCAGGAU | 3971 |
| 425 | GCUGCUAU G CCUCAUCU | 1463 | AGAUGAGG UGAUG GCAUGCACUAUGC GCG AUAGCAGC | 3972 |
| 468 | GGUAUGUU G CCCGUUUG | 1464 | CAAACGGG UGAUG GCAUGCACUAUGC GCG AACAUACC | 3973 |
| 518 | CGGACCAU G CAAAACCU | 1465 | AGGUUUUG UGAUG GCAUGCACUAUGC GCG AUGGUCCG | 3974 |
| 527 | CAAAACCU G CACAACUC | 1466 | GAGUUGUG UGAUG GCAUGCACUAUGC GCG AGGUUUUG | 3975 |
| 538 | CAACUCCU G CUCAAGGA | 1467 | UCCUUGAG UGAUG GCAUGCACUAUGC GCG AGGAGUUG | 3976 |
| 569 | CUCAUGUU G CUGUACAA | 1468 | UUGUACAG UGAUG GCAUGCACUAUGC GCG AACAUGAG | 3977 |
| 596 | CGGAAACU G CACCUGUA | 1469 | UACAGGUG UGAUG GCAUGCACUAUGC GCG AGUUUCCG | 3978 |
| 631 | GGGCUUUC G CAAAAUAC | 1470 | GUAUUUUG UGAUG GCAUGCACUAUGC GCG GAAAGCCC | 3979 |
| 687 | UUACUAGU G CCAUUUGU | 1471 | ACAAAUGG UGAUG GCAUGCACUAUGC GCG ACUAGUAA | 3980 |
| 747 | AUAUGGAU G AUGUGGUU | 1472 | AACCACAU UGAUG GCAUGCACUAUGC GCG AUCCAUAU | 3981 |
| 783 | AACAUCUU G AGUCCCUU | 1473 | AAGGGACU UGAUG GCAUGCACUAUGC GCG AAGAUGUU | 3982 |
| 795 | CCCUUUAU G CCGCUGUU | 1474 | AACAGCGG UGAUG GCAUGCACUAUGC GCG AUAAAGGG | 3983 |
| 798 | UUUAUGCC G CUGUUACC | 1475 | GGUAACAG UGAUG GCAUGCACUAUGC GCG GGCAUAAA | 3984 |
| 911 | GGCACAUU G CCACAGGA | 1476 | UCCUGUGG UGAUG GCAUGCACUAUGC GCG AAUGUGCC | 3985 |
| 978 | GGCCUAUU G AUUGGAAA | 1477 | UUUCCAAU UGAUG GCAUGCACUAUGC GCG AAUAGGCC | 3986 |
| 997 | AUGUCAAC G AAUUGUGG | 1478 | CCACAAUU UGAUG GCAUGCACUAUGC GCG GUUGACAU | 3987 |
| 1020 | UGGGGUUU G CCGCCCCU | 1479 | AGGGGCGG UGAUG GCAUGCACUAUGC GCG AAACCCCA | 3988 |
| 1023 | GGUUUGCC G CCCCUUUC | 1480 | GAAAGGGG UGAUG GCAUGCACUAUGC GCG GGCAAACC | 3989 |
| 1034 | CCUUUCAC G CAAUGUGG | 1481 | CCACAUUG UGAUG GCAUGCACUAUGC GCG GUGAAAGG | 3990 |
| 1050 | GAUAUUCU G CUUUAAUG | 1482 | CAUUAAAG UGAUG GCAUGCACUAUGC GCG AGAAUAUC | 3991 |
| 1058 | GCUUUAAU G CCUUUAUA | 1483 | UAUAAAGG UGAUG GCAUGCACUAUGC GCG AUUAAAGC | 3992 |
| 1068 | CUUUAUAU G CAUGCAUA | 1484 | UAUGCAUG UGAUG GCAUGCACUAUGC GCG AUAUAAAG | 3993 |
| 1072 | AUAUGCAU G CAUACAAG | 1485 | CUUGUAUG UGAUG GCAUGCACUAUGC GCG AUGCAUAU | 3994 |
| 1103 | ACUUUCUC G CCAACUUA | 1486 | UAAGUUGG UGAUG GCAUGCACUAUGC GCG GAGAAAGU | 3995 |
| 1139 | CAGUAUGU G AACCUUUA | 1487 | UAAAGGUU UGAUG GCAUGCACUAUGC GCG ACAUACUG | 3996 |
| 1155 | ACCCCGUU G CUCGGCAA | 1488 | UUGCCGAG UGAUG GCAUGCACUAUGC GCG AACGGGGU | 3997 |
| 1177 | UGGUCUAU G CCAAGUGU | 1489 | ACACUUGG UGAUG GCAUGCACUAUGC GCG AUAGACCA | 3998 |
| 1188 | AAGUGUUU G CUGACGCA | 1490 | UGCGUCAG UGAUG GCAUGCACUAUGC GCG AAACACUU | 3999 |
| 1191 | UGUUUGCU G ACGCAACC | 1491 | GGUUGCGU UGAUG GCAUGCACUAUGC GCG AGCAAACA | 4000 |
| 1194 | UUGCUGAC G CAACCCCC | 1492 | GGGGGUUG UGAUG GCAUGCACUAUGC GCG GUCAGCAA | 4001 |
| 1234 | CCAUCAGC G CAUGCGUG | 1493 | CACGCAUG UGAUG GCAUGCACUAUGC GCG GCUGAUGG | 4002 |
| 1238 | CAGCGCAU G CGUGGAAC | 1494 | GUUCCACG UGAUG GCAUGCACUAUGC GCG AUGCGCUG | 4003 |
| 1262 | UCUCCUCU G CCGAUCCA | 1495 | UGGAUCGG UGAUG GCAUGCACUAUGC GCG AGAGGAGA | 4004 |
| 1265 | CCUCUGCC G AUCCAUAC | 1496 | GUAUGGAU UGAUG GCAUGCACUAUGC GCG GGCAGAGG | 4005 |
| 1275 | UCCAUACC G CGGAACUC | 1497 | GAGUUCCG UGAUG GCAUGCACUAUGC GCG GGUAUGGA | 4006 |
| 1290 | UCCUAGCC G CUUGUUUU | 1498 | AAAACAAG UGAUG GCAUGCACUAUGC GCG GGCUAGGA | 4007 |
| 1299 | CUUGUUUU G CUCGCAGC | 1499 | GCUGCGAG UGAUG GCAUGCACUAUGC GCG AAAACAAG | 4008 |
| 1303 | UUUUGCUC G CAGCAGGU | 1500 | ACCUGCUG UGAUG GCAUGCACUAUGC GCG GAGCAAAA | 4009 |
| 1335 | UCGGGACU G ACAAUUCU | 1501 | AGAAUUGU UGAUG GCAUGCACUAUGC GCG AGUCCCGA | 4010 |
| 1349 | UCUGUCGU G CUCUCCCG | 1502 | CGGGAGAG UGAUG GCAUGCACUAUGC GCG ACGACAGA | 4011 |
| 1357 | GCUCUCCC G CAAAUAUA | 1503 | UAUAUUUG UGAUG GCAUGCACUAUGC GCG GGGAGAGC | 4012 |
| 1382 | CCAUGGCU G CUAGGCUG | 1504 | CAGCCUAG UGAUG GCAUGCACUAUGC GCG AGCCAUGG | 4013 |
| 1392 | UAGGCUGU G CUGCCAAC | 1505 | GUUGGCAG UGAUG GCAUGCACUAUGC GCG ACAGCCUA | 4014 |
| 1395 | GCUGUGCU G CCAACUGG | 1506 | CCAGUUGG UGAUG GCAUGCACUAUGC GCG AGCACAGC | 4015 |
| 1411 | GAUCCUAC G CGGGACGU | 1507 | ACGUCCCG UGAUG GCAUGCACUAUGC GCG GUAGGAUC | 4016 |
| 1442 | CCGUCGGC G CUGAAUCC | 1508 | GGAUUCAG UGAUG GCAUGCACUAUGC GCG GCCGACGC | 4017 |
| 1445 | UCGGCGCU G AAUCCCGC | 1509 | GCGGGAUU UGAUG GCAUGCACUAUGC GCG AGCGCCGA | 4018 |
| 1452 | UGAAUCCC G CGGACGAC | 1510 | GUCGUCCG UGAUG GCAUGCACUAUGC GCG GGGAUUCA | 4019 |
| 1458 | CCGCGGAC G ACCCCUCC | 1511 | GGAGGGGU UGAUG GCAUGCACUAUGC GCG GUCCGCGG | 4020 |
| 1474 | CCGGGGCC G CUUGGGGC | 1512 | GCCCCAAG UGAUG GCAUGCACUAUGC GCG GGCCCCGG | 4021 |
| 1489 | GCUCUACC G CCCGCUUC | 1513 | GAAGCGGG UGAUG GCAUGCACUAUGC GCG GGUAGAGC | 4022 |
| 1493 | UACCGCCC G CUUCUCCG | 1514 | CGGAGAAG UGAUG GCAUGCACUAUGC GCG GGGCGGUA | 4023 |
| 1501 | GCUUCUCC G CCUAUUGU | 1515 | ACAAUAGG UGAUG GCAUGCACUAUGC GCG GGAGAAGC | 4024 |
| 1513 | AUUGUACC G ACCGUCCA | 1516 | UGGACGGU UGAUG GCAUGCACUAUGC GCG GGUACAAU | 4025 |
| 1528 | CACGGGGC G CACCUCUC | 1517 | GAGAGGUG UGAUG GCAUGCACUAUGC GCG GCCCCGUG | 4026 |
| 1542 | CUCUUUAC G CGGACUCC | 1518 | GGAGUCCG UGAUG GCAUGCACUAUGC GCG GUAAAGAG | 4027 |
| 1559 | CCGUCUGU G CCUUCUCA | 1519 | UGAGAAGG UGAUG GCAUGCACUAUGC GCG ACAGACGG | 4028 |
| 1571 | UCUCAUCU G CCGGACCG | 1520 | CGGUCCGG UGAUG GCAUGCACUAUGC GCG AGAUGAGA | 4029 |
| 1583 | GACCGUGU G CACUUCGC | 1521 | GCGAAGUG UGAUG GCAUGCACUAUGC GCG ACACCGUC | 4030 |
| 1590 | UGCACUUC G CUUCACCU | 1522 | AGGUGAAG UGAUG GCAUGCACUAUGC GCG GAAGUGCA | 4031 |
| 1601 | UCACCUCU G CACGUCGC | 1523 | GCGACGUG UGAUG GCAUGCACUAUGC GCG AGAGGUGA | 4032 |
| 1608 | UGCACGUC G CAUGGAGA | 1524 | UCUCCAUG UGAUG GCAUGCACUAUGC GCG GACGUGCA | 4033 |
| 1624 | ACCACCGU G AACGCCCA | 1525 | UGGGCGUU UGAUG GCAUGCACUAUGC GCG ACGGUGGU | 4034 |
| 1628 | CCGUGAAC G CCCACAGG | 1526 | CCUGUGGG UGAUG GCAUGCACUAUGC GCG GUUCACGG | 4035 |
| 1642 | AGGAACCU G CCCAAGGU | 1527 | ACCUUGGG UGAUG GCAUGCACUAUGC GCG AGGUUCCU | 4036 |
| 1654 | AAGGUCUU G CAUAAGAG | 1528 | CUCUUAUG UGAUG GCAUGCACUAUGC GCG AAGACCUU | 4037 |
| 1690 | AUGUCAAC G ACCGACCU | 1529 | AGGUCGGU UGAUG GCAUGCACUAUGC GCG GUUGACAU | 4038 |
| 1694 | CAACGACC G ACCUUGAG | 1530 | CUCAAGGU UGAUG GCAUGCACUAUGC GCG GGUCGUUG | 4039 |
| 1700 | CCGACCUU G AGGCAUAC | 1531 | GUAUGCCU UGAUG GCAUGCACUAUGC GCG AAGGUCGG | 4040 |
| 1730 | UGUUUAAU G AGUGGGAG | 1532 | CUCCCACU UGAUG GCAUGCACUAUGC GCG AUUAAACA | 4041 |
| 1818 | AGCACCAU G CAACUUUU | 1533 | AAAAGUUG UGAUG GCAUGCACUAUGC GCG AUGGUGCU | 4042 |
| 1835 | UCACCUCU G CCUAAUCA | 1534 | UGAUUAGG UGAUG GCAUGCACUAUGC GCG AGAGGUGA | 4043 |
| 1883 | CAAGCUGU G CCUUGGGU | 1535 | ACCCAAGG UGAUG GCAUGCACUAUGC GCG ACAGCUUG | 4044 |
| 1912 | UGGACAUU G ACCCGUAU | 1536 | AUACGGGU UGAUG GCAUGCACUAUGC GCG AAUGUCCA | 4045 |
| 1959 | UCUUUUUU G CCUUCUGA | 1537 | UCAGAAGG UGAUG GCAUGCACUAUGC GCG AAAAAAGA | 4046 |
| 1966 | UGCCUUCU G ACUUCUUU | 1538 | AAAGAACU UGAUG GCAUGCACUAUGC GCG AGAAGGCA | 4047 |
| 1985 | UUCUAUUC G AGAUCUCC | 1539 | GGAGAUCU UGAUG GCAUGCACUAUGC GCG GAAUAGAA | 4048 |
| 1996 | AUCUCCUC G ACACCGCC | 1540 | GGCGGUGU UGAUG GCAUGCACUAUGC GCG GAGGAGAU | 4049 |
| 2002 | UCGACACC G CCUCUGCU | 1541 | AGCAGAGG UGAUG GCAUGCACUAUGC GCG GGUGUCGA | 4050 |
| 2008 | CCGCCUCU G CUCUGUAU | 1542 | AUACAGAG UGAUG GCAUGCACUAUGC GCG AGAGGCGG | 4051 |
| 2092 | GUUGGGGU G AGUUGAUG | 1543 | CAUCAACU UGAUG GCAUGCACUAUGC GCG ACCCCAAC | 4052 |
| 2097 | GGUGAGUU G AUGAAUCU | 1544 | AGAUUCAU UGAUG GCAUGCACUAUGC GCG AACUCACC | 4053 |
| 2100 | GAGUUGAU G AAUCUAGC | 1545 | GCUAGAUU UGAUG GCAUGCACUAUGC GCG AUCAACUC | 4054 |
| 2237 | UUUUGGGC G AGAAACUG | 1546 | CAGUUUCU UGAUG GCAUGCACUAUGC GCG GCCCAAAA | 4055 |
| 2251 | CUGUUCUU G AAUAUUUG | 1547 | CAAAUAUU UGAUG GCAUGCACUAUGC GCG AAGAACAG | 4056 |
| 2282 | GUGGAUUC G CACUCCUC | 1548 | GAGGAGUG UGAUG GCAUGCACUAUGC GCG GAAUCCAC | 4057 |
| 2293 | CUCCUCCU G CAUAUAGA | 1549 | UCUAUAUG UGAUG GCAUGCACUAUGC GCG AGGAGGAG | 4058 |
| 2311 | CACCAAAU G CCCCUAUC | 1550 | GAUAGGGG UGAUG GCAUGCACUAUGC GCG AUUUGGUG | 4059 |
| 2354 | UGUUAGAC G AAGAGGCA | 1551 | UGCCUCUU UGAUG GCAUGCACUAUGC GCG GUCUAACA | 4060 |
| 2388 | ACUCCCUC G CCUCGCAG | 1552 | CUGCGAGG UGAUG GCAUGCACUAUGC GCG GAGGGAGU | 4061 |
| 2393 | CUCGCCUC G CAGACGAA | 1553 | UUCGUCUG UGAUG GCAUGCACUAUGC GCG GACGCGAG | 4062 |
| 2399 | UCGCAGAC G AAGGUCUC | 1554 | GAGACCUU UGAUG GCAUGCACUAUGC GCG GUCUGCGA | 4063 |
| 2412 | UCUCAAUC G CCGCGUCG | 1555 | CGACGCGG UGAUG GCAUGCACUAUGC GCG GAUUGAGA | 4064 |
| 2415 | CAAUCGCC G CGUCGCAG | 1556 | CUGCGACG UGAUG GCAUGCACUAUGC GCG GGCGAUUG | 4065 |
| 2420 | GCCGCGUC G CAGAAGAU | 1557 | AUCUUCUG UGAUG GCAUGCACUAUGC GCG GACGCGGC | 4066 |
| 2514 | GGUACCUU G CUUUAAUC | 1558 | GAUUAAAG UGAUG GCAUGCACUAUGC GCG AAGGUACC | 4067 |
| 2549 | CUUUUCCU G ACAUUCAU | 1559 | AUGAAUGU UGAUG GCAUGCACUAUGC GCG AGGAAAAG | 4068 |
| 2560 | AUUCAUUU G CAGGAGGA | 1560 | UCCUCCUG UGAUG GCAUGCACUAUGC GCG AAAUGAAU | 4069 |
| 2576 | ACAUUGUU G AUAGAUGU | 1561 | ACAUCUAU UGAUG GCAUGCACUAUGC GCG AACAAUGU | 4070 |
| 2615 | CAGUAAAU G AAAACAGG | 1562 | CCUGUUUU UGAUG GCAUGCACUAUGC GCG AUUUACUG | 4071 |
| 2641 | UUAACUAU G CCUGCUAG | 1563 | CUAGCAGG UGAUG GCAUGCACUAUGC GCG AUAGUUAA | 4072 |
| 2645 | CUAUGCCU G CUAGGUUU | 1564 | AAACCUAG UGAUG GCAUGCACUAUGC GCG AGGCAUAG | 4073 |
| 2677 | AAAUAUUU G CCCUUAGA | 1565 | UCUAAGGG UGAUG GCAUGCACUAUGC GCG AAAUAUUU | 4074 |
| 2740 | UUCCAGAC G CGACAUUA | 1566 | UAAUGUCG UGAUG GCAUGCACUAUGC GCG GUCUGGAA | 4075 |
| 2742 | CCAGACGC G ACAUUAUU | 1567 | AAUAAUGU UGAUG GCAUGCACUAUGC GCG GCGUCUGG | 4076 |
| 2804 | CACGUAGC G CCUCAUUU | 1568 | AAAUGAGG UGAUG GCAUGCACUAUGC GCG GCUACGUG | 4077 |
| 2814 | CUCAUUUU G CGGGUCAC | 1569 | GUGACCCG UGAUG GCAUGCACUAUGC GCG AAAAUGAG | 4078 |
| 2875 | CAAACCUC G AAAAGGCA | 1570 | UGCCUUUU UGAUG GCAUGCACUAUGC GCG GAGGUUUG | 4079 |
| 2928 | UCUUCCCC G AUCAUCAG | 1571 | CUGAUGAU UGAUG GCAUGCACUAUGC GCG GGGGAAGA | 4080 |
| 2946 | UGGACCCU G CAUUCAAA | 1572 | UUUGAAUG UGAUG GCAUGCACUAUGC GCG AGGGUCCA | 4081 |
| 2990 | CUCAACCC G CACAAGGA | 1573 | UCCUUGUG UGAUG GCAUGCACUAUGC GCG GGGUUGAG | 4082 |
| 3012 | GGCCGGAC G CCAACAAG | 1574 | CUUGUUGG UGAUG GCAUGCACUAUGC GCG GUCCGGCC | 4083 |
| 3090 | GCCCUCAC G CUCAGGGC | 1575 | GCCCUGAG UGAUG GCAUGCACUAUGC GCG GUGAGGGC | 4084 |
| 3113 | ACAACUGU G CCAGCAGC | 1576 | GCUGCUGG UGAUG GCAUGCACUAUGC GCG ACAGUUGU | 4085 |
| 3132 | CUCCUCCU G CCUCCACC | 1577 | GGUGGAGG UGAUG GCAUGCACUAUGC GCG AGGAGGAG | 4086 |
| 51 | AGGGCCCU G UACUUUCC | 1578 | GGAAAGUA UGAUG GCAUGCACUAUGC GCG AGGGCCCU | 4087 |
| 106 | AGAAUACU G UCUCUGCC | 1579 | GGCAGAGA UGAUG GCAUGCACUAUGC GCG AGUAUUCU | 4088 |
| 148 | GGGACCCU G UACCGAAC | 1580 | GUUCGGUA UGAUG GCAUGCACUAUGC GCG AGGGUCCC | 4089 |
| 198 | CUGCUCGU G UUACAGGC | 1581 | GCCUGUAA UGAUG GCAUGCACUAUGC GCG ACGAGCAG | 4090 |
| 219 | UUUUUCUU G UUGACAAA | 1582 | UUUGUCAA UGAUG GCAUGCACUAUGC GCG AAGAAAAA | 4091 |
| 297 | ACACCCGU G UGUCUUGG | 1583 | CCAAGACA UGAUG GCAUGCACUAUGC GCG ACGGGUGU | 4092 |
| 299 | ACCCGUGU G UCUUGGCC | 1584 | GGCCAAGA UGAUG GCAUGCACUAUGC GCG ACACGGGU | 4093 |
| 347 | ACCAACCU G UUGUCCUC | 1585 | GAGGACAA UGAUG GCAUGCACUAUGC GCG AGGUUGGU | 4094 |
| 350 | AACCUGUU G UCCUCCAA | 1586 | UUGGAGGA UGAUG GCAUGCACUAUGC GCG AACAGGUU | 4095 |
| 362 | UCCAAUUU G UCCUGGUU | 1587 | AACCAGGA UGAUG GCAUGCACUAUGC GCG AAAUUGGA | 4096 |
| 381 | CGCUGGAU G UGUCUGCG | 1588 | CGCAGACA UGAUG GCAUGCACUAUGC GCG AUCCAGCG | 4097 |
| 383 | CUGGAUGU G UCUGCGGC | 1589 | GCCGCAGA UGAUG GCAUGCACUAUGC GCG ACAUCCAG | 4098 |
| 438 | AUCUUCUU G UUGGUUCU | 1590 | AGAACCAA UGAUG GCAUGCACUAUGC GCG AAGAAGAU | 4099 |
| 465 | CAAGGUAU G UUGCCCGU | 1591 | ACGGGCAA UGAUG GCAUGCACUAUGC GCG AUACCUUG | 4100 |
| 476 | GCCCGUUU G UCCUCUAA | 1592 | UUAGAGGA UGAUG GCAUGCACUAUGC GCG AAACGGGC | 4101 |
| 555 | ACCUCUAU G UUUCCCUC | 1593 | GAGGGAAA UGAUG GCAUGCACUAUGC GCG AUAGAGGU | 4102 |
| 566 | UCCCUCAU G UUGCUGUA | 1594 | UACAGCAA UGAUG GCAUGCACUAUGC GCG AUGAGGGA | 4103 |
| 572 | AUGUUGCU G UACAAAAC | 1595 | GUUUUGUA UGAUG GCAUGCACUAUGC GCG AGCAACAU | 4104 |
| 602 | CGCCACCU G UAUUCCCA | 1596 | UGGGAAUA UGAUG GCAUGCACUAUGC GCG AGGUGCAG | 4105 |
| 694 | UGCCAUUU G UUCAGUGG | 1597 | CCACUGAA UGAUG GCAUGCACUAUGC GCG AAAUGGCA | 4106 |
| 724 | CCCCCACU G UCUGGCUU | 1598 | AAGCCAGA UGAUG GCAUGCACUAUGC GCG AGUGGGGG | 4107 |
| 750 | UGGAUGAU G UGGUUUUG | 1599 | CAAAACCA UGAUG GCAUGCACUAUGC GCG AUCAUCCA | 4108 |
| 771 | CCAAGUCU G UACAACAU | 1600 | AUGUUGUA UGAUG GCAUGCACUAUGC GCG AGACUUGG | 4109 |
| 801 | AUGCCGCU G UUACCAAU | 1601 | AUUGGUAA UGAUG GCAUGCACUAUGC GCG AGCGGCAU | 4110 |
| 818 | UUUCUUUU G UCUUUGGG | 1602 | CCCAAAGA UGAUG GCAUGCACUAUGC GCG AAAAGAAA | 4111 |
| 888 | UGGGAUAU G UAAUUGGG | 1603 | CCCAAUUA UGAUG GCAUGCACUAUGC GCG AUAUCCCA | 4112 |
| 927 | AACAUAUU G UACAAAAA | 1604 | UUUUUGUA UGAUG GCAUGCACUAUGC GCG AAUAUGUU | 4113 |
| 944 | AUCAAAAU G UGUUUUAG | 1605 | CUAAAACA UGAUG GCAUGCACUAUGC GCG AUUUUGAU | 4114 |
| 946 | CAAAAUGU G UUUUAGGA | 1606 | UCCUAAAA UGAUG GCAUGCACUAUGC GCG ACAUUUUG | 4115 |
| 963 | AACUUCCU G UAAACAGG | 1607 | CCUGUUUA UGAUG GCAUGCACUAUGC GCG AGGAAGUU | 4116 |
| 991 | GAAAGUAU G UCAACGAA | 1608 | UUCGUUGA UGAUG GCAUGCACUAUGC GCG AUACUUUC | 4117 |
| 1002 | AACGAAUU G UGGGUCUU | 1609 | AAGACCCA UGAUG GCAUGCACUAUGC GCG AAUUCGUU | 4118 |
| 1039 | CACGCAAU G UGGAUAUU | 1610 | AAUAUCCA UGAUG GCAUGCACUAUGC GCG AUUGCGUG | 4119 |
| 1137 | AACAGUAU G UGAACCUU | 1611 | AAGGUUCA UGAUG GCAUGCACUAUGC GCG AUACUGUU | 4120 |
| 1184 | UGCCAAGU G UUUGCUGA | 1612 | UCAGCAAA UGAUG GCAUGCACUAUGC GCG ACUUGGCA | 4121 |
| 1251 | GAACCUUU G UGUCUCCU | 1613 | AGGAGACA UGAUG GCAUGCACUAUGC GCG AAAGGUUC | 4122 |
| 1253 | ACCUUUGU G UCUCCUCU | 1614 | AGAGGAGA UGAUG GCAUGCACUAUGC GCG ACAAAGGU | 4123 |
| 1294 | AGCCGCUU G UUUUGCUC | 1615 | GAGCAAAA UGAUG GCAUGCACUAUGC GCG AAGCGGCU | 4124 |
| 1344 | ACAAUUCU G UCGUGCUC | 1616 | GAGCACGA UGAUG GCAUGCACUAUGC GCG AGAAUUGU | 4125 |
| 1390 | GCUAGGCU G UGCUGCCA | 1617 | UGGCAGCA UGAUG GCAUGCACUAUGC GCG AGCCUAGC | 4126 |
| 1425 | CGUCCUUU G UUUACGUC | 1618 | GACGUAAA UGAUG GCAUGCACUAUGC GCG AAAGGACG | 4127 |
| 1508 | CGCCUAUU G UACCGACC | 1619 | GGUCGGUA UGAUG GCAUGCACUAUGC GCG AAUAGGCG | 4128 |
| 1557 | CCCCGUCU G UGCCUUCU | 1620 | AGAAGGCA UGAUG GCAUGCACUAUGC GCG AGACGGGG | 4129 |
| 1581 | CGGACCGU G UGCACUUC | 1621 | GAAGUGCA UGAUG GCAUGCACUAUGC GCG ACGGUCCG | 4130 |
| 1684 | UCAGCAAU G UCAACGAC | 1622 | GUCGUUGA UGAUG GCAUGCACUAUGC GCG AUUGCUGA | 4131 |
| 1719 | CAAAGACU G UGUGUUUA | 1623 | UAAACACA UGAUG GCAUGCACUAUGC GCG AGUCUUUG | 4132 |
| 1721 | AAGACUGU G UGUUUAAU | 1624 | AUUAAACA UGAUG GCAUGCACUAUGC GCG ACAGUCUU | 4133 |
| 1723 | GACUGUGU G UUUAAUGA | 1625 | UCAUUAAA UGAUG GCAUGCACUAUGC GCG ACACAGUC | 4134 |
| 1772 | AGGUCUUU G UACUAGGA | 1626 | UCCUAGUA UGAUG GCAUGCACUAUGC GCG AAAGACCU | 4135 |
| 1785 | AGGAGGCU G UAGGCAUA | 1627 | UAUGCCUA UGAUG GCAUGCACUAUGC GCG AGCCUCCU | 4136 |
| 1801 | AAAUUGGU G UGUUCACC | 1628 | GGUGAACA UGAUG GCAUGCACUAUGC GCG ACCAAUUU | 4137 |
| 1803 | AUGGGUGU G UUCACCAG | 1629 | CUGGUGAA UGAUG GCAUGCACUAUGC GCG ACACCAAU | 4138 |
| 1850 | CAUCUCAU G UUCAUGUC | 1630 | GACAUGAA UGAUG GCAUGCACUAUGC GCG AUGAGAUG | 4139 |
| 1856 | AUGUUCAU G UCCUACUG | 1631 | CAGUAGGA UGAUG GCAUGCACUAUGC GCG AUGAACAU | 4140 |
| 1864 | GUCCUACU G UUCAAGCC | 1632 | GGCUUGAA UGAUG GCAUGCACUAUGC GCG AGUAGGAC | 4141 |
| 1881 | UCCAAGCU G UGCCUUGG | 1633 | CCAAGGCA UGAUG GCAUGCACUAUGC GCG AGCUUGGA | 4142 |
| 1939 | GAGCUUCU G UGGAGUUA | 1634 | UAACUCCA UGAUG GCAUGCACUAUGC GCG AGAAGCUC | 4143 |
| 2013 | UCUGCUCU G UAUCGGGG | 1635 | CCCCGAUA UGAUG GCAUGCACUAUGC GCG AGAGCAGA | 4144 |
| 2045 | GGAACAUU G UUCACCUC | 1636 | GAGGUGAA UGAUG GCAUGCACUAUGC GCG AAUGUUCC | 4145 |
| 2082 | GCUAUUCU G UGUUGGGG | 1637 | CCCCAACA UGAUG GCAUGCACUAUGC GCG AGAAUAGC | 4146 |
| 2084 | UAUUCUGU G UUGGGGUG | 1638 | CACCCCAA UGAUG GCAUGCACUAUGC GCG ACAGAAUA | 4147 |
| 2167 | UCAGCUAU G UCAACGUU | 1639 | AACGUUGA UGAUG GCAUGCACUAUGC GCG AUAGCUGA | 4148 |
| 2205 | CAACUAUU G UGGUUUCA | 1640 | UGAAACCA UGAUG GCAUGCACUAUGC GCG AAUAGUUG | 4149 |
| 2222 | CAUUUCCU G UCUUACUU | 1641 | AAGUAAGA UGAUG GCAUGCACUAUGC GCG AGGAAAUG | 4150 |
| 2245 | GAGAAACU G UUCUUGAA | 1642 | UUCAAGAA UGAUG GCAUGCACUAUGC GCG AGUUUCUC | 4151 |
| 2262 | UAUUUGGU G UCUUUUGG | 1643 | CCAAAAGA UGAUG GCAUGCACUAUGC GCG ACCAAAUA | 4152 |
| 2274 | UUUGGAGU G UGGAUUCG | 1644 | CGAAUCCA UGAUG GCAUGCACUAUGC GCG ACUCCAAA | 4153 |
| 2344 | AAACUACU G UUGUUAGA | 1645 | UCUAACAA UGAUG GCAUGCACUAUGC GCG AGUAGUUU | 4154 |
| 2347 | CUACUGUU G UUAGACGA | 1646 | UCGUCUAA UGAUG GCAUGCACUAUGC GCG AACAGUAG | 4155 |
| 2450 | AUCUCAAU G UUAGUAUU | 1647 | AAUACUAA UGAUG GCAUGCACUAUGC GCG AUUGAGAU | 4156 |
| 2573 | AGGACAUU G UUGAUAGA | 1648 | UCUAUCAA UGAUG GCAUGCACUAUGC GCG AAUGUCCU | 4157 |
| 2583 | UGAUAGAU G UAAGCAAU | 1649 | AUUGCUUA UGAUG GCAUGCACUAUGC GCG AUCUAUCA | 4158 |
| 2594 | AGCAAUUU G UGGGGCCC | 1650 | GGGCCCCA UGAUG GCAUGCACUAUGC GCG AAAUUGCU | 4159 |
| 2663 | AUCCCAAU G UUACUAAA | 1651 | UUUAGUAA UGAUG GCAUGCACUAUGC GCG AUUGGGAU | 4160 |
| 2717 | CAGAGUAC G UAGUUAAU | 1652 | AUUAACUA UGAUG GCAUGCACUAUGC GCG AUACUCUG | 4161 |
| 2901 | AUCUUUCU G UCCCCAAU | 1653 | AUUGGGGA UGAUG GCAUGCACUAUGC GCG AGAAAGAU | 4162 |
| 3071 | GGGGGACU G UUGGGGUG | 1654 | CACCCCAA UGAUG GCAUGCACUAUGC GCG AGUCCCCC | 4163 |
| 3111 | UCACAACU G UGCCAGCA | 1655 | UGCUGGCA UGAUG GCAUGCACUAUGC GCG AGUUGUGA | 4164 |

Input Sequence = AF100308.
Cut Site = YG/M or UC/U.
Stem Length = 8.
Core Sequence = UGAUG GCAUGCACUAUGC GCG
AF100308 (Hepatitis B virus strain 2-18, 3215 bp)

[0251] TABLE VIII
HUMAN HBV ZINZYME AND SUBSTRATE SEQUENCE

| Pos | Substrate | Seq ID | Zinzyme | Seq ID |
|---|---|---|---|---|
| 61 | ACUUUCCU G GUGGUGGC | 1448 | GCCACCAG GCcgaaagGCGaGuCaaGGuCu AGGAAAGU | 4165 |
| 94 | UGAGCCCU G CUCAGAAU | 1450 | AUUCUGAG GCcgaaagGCGaGuCaaGGuCu AGGGCUCA | 4166 |
| 112 | CUGUCUCU G CCAUAUCG | 1451 | CGAUAUGG GCcgaaagGCGaGuCaaGGuCu AGAGACAG | 4167 |
| 169 | AGAACAUC G CAUCAGGA | 1454 | UCCUGAUG GCcgaaagGCGaGuCaaGGuCu GAUGUUCU | 4168 |
| 192 | GGACCCCU G CUCGUGUU | 1455 | AACACGAG GCcgaaagGCGaGuCaaGGuCu AGGGGUCC | 4169 |
| 315 | CAAAAUUC G CAGUCCCA | 1457 | UGGGACUG GCcgaaagGCGaGuCaaGGuCu GAAUUUUG | 4170 |
| 374 | UGGUUAUC G CUGGAUGU | 1458 | ACAUCCAG GCcgaaagGCGaGuCaaGGuCu GAUAACCA | 4171 |
| 387 | AUGUGUCU G CGGCGUUU | 1459 | AAACGCCG GCcgaaagGCGaGuCaaGGuCu AGACACAU | 4172 |
| 410 | CUUCCUCU G CAUCCUGC | 1460 | GCAGGAUG GCcgaaagGCGaGuCaaGGuCu AGAGGAAG | 4173 |
| 417 | UGCAUCCU G CUGCUAUG | 1461 | CAUAGCAG GCcgaaagGCGaGuCaaGGuCu AGGAUGCA | 4174 |
| 420 | AUCCUGCU G CUAUGCCU | 1462 | AGGCAUAG GCcgaaagGCGaGuCaaGGuCu AGCAGGAU | 4175 |
| 425 | GCUGCUAU G CCUCAUCU | 1463 | AGAUGAGG GCcgaaagGCGaGuCaaGGuCu AUAGCAGC | 4176 |
| 468 | GGUAUGUU G CCCGUUUG | 1464 | CAAACGGG GCcgaaagGCGaGuCaaGGuCu AACAUACC | 4177 |
| 518 | CGGACCAU G CAAAACCU | 1465 | AGGUUUUG GCcgaaagGCGaGuCaaGGuCu AUGGUCCG | 4178 |
| 527 | CAAAACCU G CACAACUC | 1466 | GAGUUGUG GCcgaaagGCGaGuCaaGGuCu AGGUUUUG | 4179 |
| 538 | CAACUCCU G CUCAAGGA | 1467 | UCCUUGAG GCcgaaagGCGaGuCaaGGuCu AGGAGUUG | 4180 |
| 569 | CUCAUGUU G CUGUACAA | 1468 | UUGUACAG GCcgaaagGCGaGuCaaGGuCu AACAUGAG | 4181 |
| 596 | CGGAAACU G CACCUGUA | 1469 | UACAGGUG GCcgaaagGCGaGuCaaGGuCu AGUUUCCG | 4182 |
| 631 | GGGCUUUC G CAAAAUAC | 1470 | GUAUUUUG GCcgaaagGCGaGuCaaGGuCu GAAAGCCC | 4183 |
| 687 | UUACUAGU G CCAUUUGU | 1471 | ACAAAUGG GCcgaaagGCGaGuCaaGGuCu ACUAGUAA | 4184 |
| 795 | CCCUUUAU G CCGCUGUU | 1474 | AACAGCGG GCcgaaagGCGaGuCaaGGuCu AUAAAGGG | 4185 |
| 798 | UUUAUGCC G CUGUUACC | 1475 | GGUAACAG GCcgaaagGCGaGuCaaGGuCu GGCAUAAA | 4186 |
| 911 | GGCACAUU G CCACAGGA | 1476 | UCCUGUGG GCcgaaagGCGaGuCaaGGuCu AAUGUGCC | 4187 |
| 1020 | UGGGGUUU G CCGCCCCU | 1479 | AGGGGCGG GCcgaaagGCGaGuCaaGGuCu AAACCCCA | 4188 |
| 1023 | GGUUUGCC G CCCCUUUC | 1480 | GAAAGGGG GCcgaaagGCGaGuCaaGGuCu GGCAAACC | 4189 |
| 1034 | CCUUUCAC G CAAUGUGG | 1481 | CCACAUUG GCcgaaagGCGaGuCaaGGuCu GUGAAAGG | 4190 |
| 1050 | GAUAUUCU G CUUUAAUG | 1482 | CAUUAAAG GCcgaaagGCGaGuCaaGGuCu AGAAUAUC | 4191 |
| 1058 | GCUUUAAU G CCUUUAUA | 1483 | UAUAAAGG GCcgaaagGCGaGuCaaGGuCu AUUAAAGC | 4192 |
| 1068 | CUUUAUAU G CAUGCAUA | 1484 | UAUGCAUG GCcgaaagGCGaGuCaaGGuCu AUAUAAAG | 4193 |
| 1072 | AUAUGCAU G CAUACAAG | 1485 | CUUGUAUG GCcgaaagGCGaGuCaaGGuCu AUGCAUAU | 4194 |
| 1103 | ACUUUCUC G CCAACUUA | 1486 | UAAGUUGG GCcgaaagGCGaGuCaaGGuCu GAGAAAGU | 4195 |
| 1155 | ACCCCGUU G CUCGGCAA | 1488 | UUGCCGAG GCcgaaagGCGaGuCaaGGuCu AACGGGGU | 4196 |
| 1177 | UGGUCUAU G CCAAGUGU | 1489 | ACACUUGG GCcgaaagGCGaGuCaaGGuCu AUAGACCA | 4197 |
| 1188 | AAGUGUUU G CUGACGCA | 1490 | UGCGUCAG GCcgaaagGCGaGuCaaGGuCu AAACACUU | 4198 |
| 1194 | UUGCUGAC G CAACCCCC | 1492 | GGGGGUUG GCcgaaagGCGaGuCaaGGuCu GUCAGCAA | 4199 |
| 1234 | CCAUCAGC G CAUGCGUG | 1493 | CACGCAUG GCcgaaagGCGaGuCaaGGuCu GCUGAUGG | 4200 |
| 1238 | CAGCGCAU G CGUGGAAC | 1494 | GUUCCACG GCcgaaagGCGaGuCaaGGuCu AUGCGCUG | 4201 |
| 1262 | UCUCCUCU G CCGAUCCA | 1495 | UGGAUCGG GCcgaaagGCGaGuCaaGGuCu AGAGGAGA | 4202 |
| 1275 | UCCAUACC G CGGAACUC | 1497 | GAGUUCCG GCcgaaagGCGaGuCaaGGuCu GGUAUGGA | 4203 |
| 1290 | UCCUAGCC G CUUGUUUU | 1498 | AAAACAAG GCcgaaagGCGaGuCaaGGuCu GGCUAGGA | 4204 |
| 1299 | CUUGUUUU G CUCGCAGC | 1499 | GCUGCGAG GCcgaaagGCGaGuCaaGGuCu AAAACAAG | 4205 |
| 1303 | UUUUGCUC G CAGCAGGU | 1500 | ACCUGCUG GCcgaaagGCGaGuCaaGGuCu GAGCAAAA | 4206 |
| 1349 | UCUGUCGU G CUCUCCCG | 1502 | CGGGAGAG GCcgaaagGCGaGuCaaGGuCu ACGACAGA | 4207 |
| 1357 | GCUCUCCC G CAAAUAUA | 1503 | UAUAUUUG GCcgaaagGCGaGuCaaGGuCu GGGAGAGC | 4208 |
| 1382 | CCAUGGCU G CUAGGCUG | 1504 | CAGCCUAG GCcgaaagGCGaGuCaaGGuCu AGCCAUGG | 4209 |
| 1392 | UAGGCUGU G CUGCCAAC | 1505 | GUUGGCAG GCcgaaagGCGaGuCaaGGuCu ACAGCCUA | 4210 |
| 1395 | GCUGUGCU G CCAACUGG | 1506 | CCAGUUGG GCcgaaagGCGaGuCaaGGuCu AGCACAGC | 4211 |
| 1411 | GAUCCUAC G CGGGACGU | 1507 | ACGUCCCG GCcgaaagGCGaGuCaaGGuCu GUAGGAUC | 4212 |
| 1442 | CCGUCGGC G CUGAAUCC | 1508 | GGAUUCAG GCcgaaagGCGaGuCaaGGuCu GCCGACGG | 4213 |
| 1452 | UGAAUCCC G CGGACGAC | 1510 | GUCGUCCG GCcgaaagGCGaGuCaaGGuCu GGGAUUCA | 4214 |
| 1474 | CCGGGGCC G CUUGGGGC | 1512 | GCCCCAAG GCcgaaagGCGaGuCaaGGuCu GGCCCCGG | 4215 |
| 1489 | GCUCUACC G CCCGCUUC | 1513 | GAAGCGGG GCcgaaagGCGaGuCaaGGuCu GGUAGAGC | 4216 |
| 1493 | UACCGCCC G CUUCUCCG | 1514 | CGGAGAAG GCcgaaagGCGaGuCaaGGuCu GGGCGGUA | 4217 |
| 1501 | GCUUCUCC G CCUAUUGU | 1515 | ACAAUAGG GCcgaaagGCGaGuCaaGGuCu GGAGAAGC | 4218 |
| 1528 | CACGGGGC G CACCUCUC | 1517 | GAGAGGUG GCcgaaagGCGaGuCaaGGuCu GCCCCGUG | 4219 |
| 1542 | CUCUUUAC G CGGACUCC | 1518 | GGAGUCCG GCcgaaagGCGaGuCaaGGuCu GUAAAGAG | 4220 |
| 1559 | CCGUCUGU G CCUUCUCA | 1519 | UGAGAAGG GCcgaaagGCGaGuCaaGGuCu ACAGACGG | 4221 |
| 1571 | UCUCAUCU G CCGGACCG | 1520 | CGGUCCGG GCcgaaagGCGaGuCaaGGuCu AGAUGAGA | 4222 |
| 1583 | GACCGUGU G CACUUCGC | 1521 | GCGAAGUG GCcgaaagGCGaGuCaaGGuCu ACACGGUC | 4223 |
| 1590 | UGCACUUC G CUUCACCU | 1522 | AGGUGAAG GCcgaaagGCGaGuCaaGGuCu GAAGUGCA | 4224 |
| 1601 | UCACCUCU G CACGUCGC | 1523 | GCGACGUG GCcgaaagGCGaGuCaaGGuCu AGAGGUGA | 4225 |
| 1608 | UGCACGUC G CAUGGAGA | 1524 | UCUCCAUG GCcgaaagGCGaGuCaaGGuCu GACGUGCA | 4226 |
| 1628 | CCGUGAAC G CCCACAGG | 1526 | CCUGUGGG GCcgaaagGCGaGuCaaGGuCu GUUCACGG | 4227 |
| 1642 | AGGAACCU G CCCAAGGU | 1527 | ACCUUGGG GCcgaaagGCGaGuCaaGGuCu AGGUUCCU | 4228 |
| 1654 | AAGGUCUU G CAUAAGAG | 1528 | CUCUUAUG GCcgaaagGCGaGuCaaGGuCu AAGACCUU | 4229 |
| 1818 | AGCACCAU G CAACUUUU | 1533 | AAAAGUUG GCcgaaagGCGaGuCaaGGuCu AUGGUGCU | 4230 |
| 1835 | UCACCUCU G CCUAAUCA | 1534 | UGAUUAGG GCcgaaagGCGaGuCaaGGuCu AGAGGUGA | 4231 |
| 1883 | CAAGCUGU G CCUUGGGU | 1535 | ACCCAAGG GCcgaaagGCGaGuCaaGGuCu ACACGUUG | 4232 |
| 1959 | UCUUUUUU G CCUUCUGA | 1537 | UCAGAAGG GCcgaaagGCGaGuCaaGGuCu AAAAAAGA | 4233 |
| 2002 | UCGACACC G CCUCUGCU | 1541 | AGCAGAGG GCcgaaagGCGaGuCaaGGuCu GGUGUCGA | 4234 |
| 2008 | CCGCCUCU G CUCUGUAU | 1542 | AUACAGAG GCcgaaagGCGaGuCaaGGuCu AGAGGCGG | 4235 |
| 2282 | GUGGAUUC G CACUCCUC | 1548 | GAGGAGUG GCcgaaagGCGaGuCaaGGuCu GAAUCCAC | 4236 |
| 2293 | CUCCUCCU G CAUAUAGA | 1549 | UCUAUAUG GCcgaaagGCGaGuCaaGGuCu AGGAGGAG | 4237 |
| 2311 | CACCAAAU G CCCCUAUC | 1550 | GAUAGGGG GCcgaaagGCGaGuCaaGGuCu AUUUGGUG | 4238 |
| 2388 | ACUCCCUC G CCUCGCAG | 1552 | CUGCGAGG GCcgaaagGCGaGuCaaGGuCu GAGGGAGU | 4239 |
| 2393 | CUCGCCUC G CAGACGAA | 1553 | UUCGUCUG GCcgaaagGCGaGuCaaGGuCu GAGGCGAG | 4240 |
| 2412 | UCUCAAUC G CCGCGUCG | 1555 | CGACGCGG GCcgaaagGCGaGuCaaGGuCu GAUUGAGA | 4241 |
| 2415 | CAAUCGCC G CGUCGCAG | 1556 | CUGCGACG GCcgaaagGCGaGuCaaGGuCu GGCGAUUG | 4242 |
| 2420 | GCCGCGUC G CAGAAGAU | 1557 | AUCUUCUG GCcgaaagGCGaGuCaaGGuCu GACGCGGC | 4243 |
| 2514 | GGUACCUU G CUUUAAUC | 1558 | GAUUAAAG GCcgaaagGCGaGuCaaGGuCu AAGGUACC | 4244 |
| 2560 | AUUCAUUU G CAGGAGGA | 1560 | UCCUCCUG GCcgaaagGCGaGuCaaGGuCu AAAUGAAU | 4245 |
| 2641 | UUAACUAU G CCUGCUAG | 1563 | CUAGCAGG GCcgaaagGCGaGuCaaGGuCu AUAGUUAA | 4246 |
| 2645 | CUAUGCCU G CUAGGUUU | 1564 | AAACCUAG GCcgaaagGCGaGuCaaGGuCu AGGCAUAG | 4247 |
| 2677 | AAAUAUUU G CCCUUAGA | 1565 | UCUAAGGG GCcgaaagGCGaGuCaaGGuCu AAAUAUUU | 4248 |
| 2740 | UUCCAGAC G CGACAUUA | 1566 | UAAUGUCG GCcgaaagGCGaGuCaaGGuCu GUCUGGAA | 4249 |
| 2804 | CACGUAGC G CCUCAUUU | 1568 | AAAUGAGG GCcgaaagGCGaGuCaaGGuCu GCUACGUG | 4250 |
| 2814 | CUCAUUUU G CGGGUCAC | 1569 | GUGACCCG GCcgaaagGCGaGuCaaGGuCu AAAAUGAG | 4251 |
| 2946 | UGGACCCU G CAUUCAAA | 1572 | UUUGAAUG GCcgaaagGCGaGuCaaGGuCu AGGGUCCA | 4252 |
| 2990 | CUCAACCC G CACAAGGA | 1573 | UCCUUGUG GCcgaaagGCGaGuCaaGGuCu GGGUUGAG | 4253 |
| 3012 | GGCCGGAC G CCAACAAG | 1574 | CUUGUUGG GCcgaaagGCGaGuCaaGGuCu GUCCGGCC | 4254 |
| 3090 | GCCCUCAC G CUCAGGGC | 1575 | GCCCUGAG GCcgaaagGCGaGuCaaGGuCu GUGAGGGC | 4255 |
| 3113 | ACAACUGU G CCAGCAGC | 1576 | GCUGCUGG GCcgaaagGCGaGuCaaGGuCu ACAGUUGU | 4256 |
| 3132 | CUCCUCCU G CCUCCACC | 1577 | GGUGGAGG GCcgaaagGCGaGuCaaGGuCu AGGAGGAG | 4257 |
| 51 | AGGGCCCU G UACUUUCC | 1578 | GGAAAGUA GCcgaaagGCGaGuCaaGGuCu AGGGCCCU | 4258 |
| 106 | AGAAUACU G UCUCUGCC | 1579 | GGCAGAGA GCcgaaagGCGaGuCaaGGuCu AGUAUUCU | 4259 |
| 148 | GGGACCCU G UACCGAAC | 1580 | GUUCGGUA GCcgaaagGCGaGuCaaGGuCu AGGGUCCC | 4260 |
| 198 | CUGCUCGU G UUACAGGC | 1581 | GCCUGUAA GCcgaaagGCGaGuCaaGGuCu ACGAGCAG | 4261 |
| 219 | UUUUUCUU G UUGACAAA | 1582 | UUUGUCAA GCcgaaagGCGaGuCaaGGuCu AAGAAAAA | 4262 |
| 297 | ACACCCGU G UGUCUUGG | 1583 | CCAAGACA GCcgaaagGCGaGuCaaGGuCu ACGGGUGU | 4263 |
| 299 | ACCCGUGU G UCUUGGCC | 1584 | GGCCAAGA GCcgaaagGCGaGuCaaGGuCu ACACGGGU | 4264 |
| 347 | ACCAACCU G UUCUCCUC | 1585 | GAGGACAA GCcgaaagGCGaGuCaaGGuCu AGGUUGGU | 4265 |
| 350 | AACCUGUU G UCCUCCAA | 1586 | UUGGAGGA GCcgaaagGCGaGuCaaGGuCu AACAGGUU | 4266 |
| 362 | UCCAAUUU G UCCUGGUU | 1587 | AACCAGGA GCcgaaagGCGaGuCaaGGuCu AAAUUGGA | 4267 |
| 381 | CGCUGGAU G UGUCUGCG | 1588 | CGCAGACA GCcgaaagGCGaGuCaaGGuCu AUCCAGCG | 4268 |
| 383 | CUGGAUGU G UCUGCGGC | 1589 | GCCGCAGA GCcgaaagGCGaGuCaaGGuCu ACAUCCAG | 4269 |
| 438 | AUCUUCUU G UUGGUUCU | 1590 | AGAACCAA GCcgaaagGCGaGuCaaGGuCu AAGAAGAU | 4270 |
| 465 | CAAGGUAU G UUGCCCGU | 1591 | ACGGGCAA GCcgaaagGCGaGuCaaGGuCu AUACCUUG | 4271 |
| 476 | GCCCGUUU G UCCUCUAA | 1592 | UUAGAGGA GCcgaaagGCGaGuCaaGGuCu AAACGGGC | 4272 |
| 555 | ACCUCUAU G UUUCCCUC | 1593 | GAGGGAAA GCcgaaagGCGaGuCaaGGuCu AUAGAGGU | 4273 |
| 566 | UCCCUCAU G UUGCUGUA | 1594 | UACAGCAA GCcgaaagGCGaGuCaaGGuCu AUGAGGGA | 4274 |
| 572 | AUGUUGCU G UACAAAAC | 1595 | GUUUUGUA GCcgaaagGCGaGuCaaGGuCu AGCAACAU | 4275 |
| 602 | CUGCACCU G UAUUCCCA | 1596 | UGGGAAUA GCcgaaagGCGaGuCaaGGuCu AGGUGCAG | 4276 |
| 694 | UGCCAUUU G UUCAGUGG | 1597 | CCACUGAA GCcgaaagGCGaGuCaaGGuCu AAAUGGCA | 4277 |
| 724 | CCCCCACU G UCUGGCUU | 1598 | AAGCCAGA GCcgaaagGCGaGuCaaGGuCu AGUGGGGG | 4278 |
| 750 | UGGAUGAU G UGGUUUUG | 1599 | CAAAACCA GCcgaaagGCGaGuCaaGGuCu AUCAUCCA | 4279 |
| 771 | CCAAGUCU G UACAACAU | 1600 | AUGUUGUA GCcgaaagGCGaGuCaaGGuCu AGACUUGG | 4280 |
| 801 | AUGCCGCU G UUACCAAU | 1601 | AUUGGUAA GCcgaaagGCGaGuCaaGGuCu AGCGGCAU | 4281 |
| 818 | UUUCUUUU G UCUUUGGG | 1602 | CCCAAAGA GCcgaaagGCGaGuCaaGGuCu AAAAGAAA | 4282 |
| 888 | UGGGAUAU G UAAUUGGG | 1603 | CCCAAUUA GCcgaaagGCGaGuCaaGGuCu AUAUCCCA | 4283 |
| 927 | AACAUAUU G UACAAAAA | 1604 | UUUUUGUA GCcgaaagGCGaGuCaaGGuCu AAUAUGUU | 4284 |
| 944 | AUCAAAAU G UGUUUUAG | 1605 | CUAAAACA GCcgaaagGCGaGuCaaGGuCu AUUUUGAU | 4285 |
| 946 | CAAAAUGU G UUUUAGGA | 1606 | UCCUAAAA GCcgaaagGCGaGuCaaGGuCu ACAUUUUG | 4286 |
| 963 | AACUUCCU G UAAACAGG | 1607 | CCUGUUUA GCcgaaagGCGaGuCaaGGuCu AGGAAGUU | 4287 |
| 991 | GAAAGUAU G UCAACGAA | 1608 | UUCGUUGA GCcgaaagGCGaGuCaaGGuCu AUACUUUC | 4288 |
| 1002 | AACGAAUU G UGGGUCUU | 1609 | AAGACCCA GCcgaaagGCGaGuCaaGGuCu AAUUCGUU | 4289 |
| 1039 | CACGCAAU G UGGAUAUU | 1610 | AAUAUCCA GCcgaaagGCGaGuCaaGGuCu AUUGCGUG | 4290 |
| 1137 | AACAGUAU G UGAACCUU | 1611 | AAGGUUCA GCcgaaagGCGaGuCaaGGuCu AUACUGUU | 4291 |
| 1184 | UGCCAAGU G UUUGCUGA | 1612 | UCAGCAAA GCcgaaagGCGaGuCaaGGuCu ACUUGGCA | 4292 |
| 1251 | GAACCUUU G UGUCUCCU | 1613 | AGGAGACA GCcgaaagGCGaGuCaaGGuCu AAAGGUUC | 4293 |
| 1253 | ACCUUUGU G UCUCCUCU | 1614 | AGAGGAGA GCcgaaagGCGaGuCaaGGuCu ACAAAGGU | 4294 |
| 1294 | AGCCGCUU G UUUUGCUC | 1615 | GAGCAAAA GCcgaaagGCGaGuCaaGGuCu AAGCGGCU | 4295 |
| 1344 | ACAAUUCU G UCGUGCUC | 1616 | GAGCACGA GCcgaaagGCGaGuCaaGGuCu AGAAUUGU | 4296 |
| 1390 | GCUAGGCU G UGCUGCCA | 1617 | UGGCAGCA GCcgaaagGCGaGuCaaGGuCu ACCCUAGC | 4297 |
| 1425 | CGUCCUUU G UUUACGUC | 1618 | GACGUAAA GCcgaaagGCGaGuCaaGGuCu AAAGGACG | 4298 |
| 1508 | CGCCUAUU G UACCGACC | 1619 | GGUCGGUA GCcgaaagGCGaGuCaaGGuCu AAUAGGCG | 4299 |
| 1557 | CCCCGUCU G UGCCUUCU | 1620 | AGAAGGCA GCcgaaagGCGaGuCaaGGuCu AGACGGGG | 4300 |
| 1581 | CGGACCGU G UGCACUUC | 1621 | GAAGUGCA GCcgaaagGCGaGuCaaGGuCu ACGGUCCG | 4301 |
| 1684 | UCAGCAAU G UCAACGAC | 1622 | GUCGUUGA GCcgaaagGCGaGuCaaGGuCu AUUGCUGA | 4302 |
| 1719 | CAAAGACU G UGUGUUUA | 1623 | UAAACACA GCcgaaagGCGaGuCaaGGuCu AGUCUUUG | 4303 |
| 1721 | AAGACUGU G UGUUUAAU | 1624 | AUUAAACA GCcgaaagGCGaGuCaaGGuCu ACAGUCUU | 4304 |
| 1723 | GACUGUGU G UUUAAUGA | 1625 | UCAUUAAA GCcgaaagGCGaGuCaaGGuCu ACACAGUC | 4305 |
| 1772 | AGGUCUUU G UACUAGGA | 1626 | UCCUAGUA GCcgaaagGCGaGuCaaGGuCu AAAGACCU | 4306 |
| 1785 | AGGAGGCU G UAGGCAUA | 1627 | UAUGCCUA GCcgaaagGCGaGuCaaGGuCu AGCCUCCU | 4307 |
| 1801 | AAAUUGGU G UGUUCACC | 1628 | GGUGAACA GCcgaaagGCGaGuCaaGGuCu ACCAAUUU | 4308 |
| 1803 | AUUGGUGU G UUCACCAG | 1629 | CUGGUGAA GCcgaaagGCGaGuCaaGGuCu ACACCAAU | 4309 |
| 1850 | CAUCUCAU G UUCAUGUC | 1630 | GACAUGAA GCcgaaagGCGaGuCaaGGuCu AUGAGAUG | 4310 |
| 1856 | AUGUUCAU G UCCUACUG | 1631 | CAGUAGGA GCcgaaagGCGaGuCaaGGuCu AUGAACAU | 4311 |
| 1864 | GUCCUACH G UUCAAGCC | 1632 | GGCUUGAA GCcgaaagGCGaGuCaaGGuCu AGUAGGAC | 4312 |
| 1881 | UCCAACCU G UGCCUUGG | 1633 | CCAAGGCA GCcgaaagGCGaGuCaaGGuCu AGCUUGGA | 4313 |
| 1939 | GAGCUUCU G UGGAGUUA | 1634 | UAACUCCA GCcgaaagGCGaGuCaaGGuCu AGAAGCUC | 4314 |
| 2013 | UCUGCUCU G UAUCGGGG | 1635 | CCCCGAUA GCcgaaagGCGaGuCaaGGuCu AGAGCAGA | 4315 |
| 2045 | GGAACAUU G UUCACCUC | 1636 | CAGGUGAA GCcgaaagGCGaGuCaaGGuCu AAUGUUCC | 4316 |
| 2082 | GCUAUUCU G UGUUGGGG | 1637 | CCCCAACA GCcgaaagGCGaGuCaaGGuCu AGAAUAGC | 4317 |
| 2084 | UAUUCUGU G UUGGGGUG | 1638 | CACCCCAA GCcgaaagGCGaGuCaaGGuCu ACAGAAUA | 4318 |
| 2167 | UCAGCUAU G UCAACGUU | 1639 | AACGUUGA GCcgaaagGCGaGuCaaGGuCu AUAGCUGA | 4319 |
| 2205 | CAACUAUU G UGGUUUCA | 1640 | UGAAACCA GCcgaaagGCGaGuCaaGGuCu AAUAGUUG | 4320 |
| 2222 | CAUUUCCU G UCUUACUU | 1641 | AAGUAAGA GCcgaaagGCGaGuCaaGGuCu AGGAAAUG | 4321 |
| 2245 | GAGAAACU G UUCUUGAA | 1642 | UUCAAGAA GCcgaaagGCGaGuCaaGGuCu AGUUUCUC | 4322 |
| 2262 | UAUUUGGU G UCUUUUGG | 1643 | CGAAAAGA GCcgaaagGCGaGuCaaGGuCu ACCAAAUA | 4323 |
| 2274 | UUUGGAGU G UGGAUUCG | 1644 | CGAAUCCA GCcgaaagGCGaGuCaaGGuCu ACUCCAAA | 4324 |
| 2344 | AAACUACU G UUGUUAGA | 1645 | UCUAACAA GCcgaaagGCGaGuCaaGGuCu AGUAGUUU | 4325 |
| 2347 | CUACUGUU G UUAGACGA | 1646 | UCGUCUAA GCcgaaagGCGaGuCaaGGuCu AACAGUAG | 4326 |
| 2450 | AUCUCAAU G UUAGUAUU | 1647 | AAUACUAA GCcgaaagGCGaGuCaaGGuCu AUUGAGAU | 4327 |
| 2573 | AGGACAUU G UUGAUAGA | 1648 | UCUAUCAA GCcgaaagGCGaGuCaaGGuCu AAUGUCCU | 4328 |
| 2583 | UGAUAGAU G UAAGCAAU | 1649 | AUUGCUUA GCcgaaagGCGaGuCaaGGuCu AUCUAUCA | 4329 |
| 2594 | AGCAUUUU G UGGGGCCC | 1650 | GGGCCCCA GCcgaaagGCGaGuCaaGGuCu AAAUUGCU | 4330 |
| 2663 | AUCCCAAU G UUACUAAA | 1651 | UUUAGUAA GCcgaaagGCGaGuCaaGGuCu AUUGGGAU | 4331 |
| 2717 | CAGAGUAU G UAGUUAAU | 1652 | AUUAACUA GCcgaaagGCGaGuCaaGGuCu AUACUCUG | 4332 |
| 2901 | AUCUUUCU G UCCCCAAU | 1653 | AUUGGGGA GCcgaaagGCGaGuCaaGGuCu AGAAAGAU | 4333 |
| 3071 | GGGGGACU G UUGGGGUG | 1654 | CACCCCAA GCcgaaagGCGaGuCaaGGuCu AGUCCCCC | 4334 |
| 3111 | UCACAACU G UGCCAGCA | 1655 | UGCUGGCA GCcgaaagGCGaGuCaaGGuCu AGUUGUGA | 4335 |
| 40 | AUCCCACA G UCAGGGCC | 1656 | GGCCCUGA GCcgaaagGCGaGuCaaGGuCu UCUGGGAU | 4336 |
| 46 | GAGUCAGG G CCCUGUAC | 1657 | GUACAGGG GCcgaaagGCGaGuCaaGGuCu CCUGACUC | 4337 |
| 65 | UCCUGCUG G UGGCUCCA | 1658 | UGGAGCCA GCcgaaagGCGaGuCaaGGuCu CAGCAGGA | 4338 |
| 68 | UGCUGGUG G CUCCAGUU | 1659 | AACUGGAG GCcgaaagGCGaGuCaaGGuCu CACCAGCA | 4339 |
| 74 | UGGCUCCA G UUCAGGAA | 1660 | UUCCUGAA GCcgaaagGCGaGuCaaGGuCu UGGAGCCA | 4340 |
| 85 | CAGGAACA G UGAGCCCU | 1661 | AGGGCUCA GCcgaaagGCGaGuCaaGGuCu UGUUCCUG | 4341 |
| 89 | AACAGUGA G CCCUGCUC | 1662 | GAGCAGGG GCcgaaagGCGaGuCaaGGuCu UCACUGUU | 4342 |
| 120 | GCCAUAUC G UCAAUCUU | 1663 | AAGAUUGA GCcgaaagGCGaGuCaaGGuCu GAUAUGGC | 4343 |
| 196 | CCCUGCUC G UGUUACAG | 1664 | CUGUAACA GCcgaaagGCGaGuCaaGGuCu GAGCAGGG | 4344 |
| 205 | UGUUACAG G CGGGGUUU | 1665 | AAACCCCG GCcgaaagGCGaGuCaaGGuCu CUGUAACA | 4345 |
| 210 | CAGGCGGG G UUUUUCUU | 1666 | AAGAAAAA GCcgaaagGCGaGuCaaGGuCu CCCGCCUG | 4346 |
| 248 | ACCACAGA G UCUAGACU | 1667 | AGUCUAGA GCcgaaagGCGaGuCaaGGuCu UCUGUGGU | 4347 |
| 258 | CUAGACUC G UGGUGGAC | 1668 | GUCCACCA GCcgaaagGCGaGuCaaGGuCu GAGUCUAG | 4348 |
| 261 | GACUCGUG G UGGACUUC | 1669 | GAAGUCCA GCcgaaagGCGaGuCaaGGuCu CACGAGUC | 4349 |
| 295 | GAACACCC G UGUGUCUU | 1670 | AAGACACA GCcgaaagGCGaGuCaaGGuCu GGGUGUUC | 4350 |
| 305 | GUGUCUUG G CCAAAAUU | 1671 | AAUUUUGG GCcgaaagGCGaGuCaaGGuCu CAAGACAC | 4351 |
| 318 | AAUUCGCA G UCCCAAAU | 1672 | AUUUGGGA GCcgaaagGCGaGuCaaGGuCu UGCGAAUU | 4352 |
| 332 | AAUCUCCA G UCACUCAC | 1673 | GUGAGUGA GCcgaaagGCGaGuCaaGGuCu UGGAGAUU | 4353 |
| 368 | UUGUCCUG G UUAUCGCU | 1674 | AGCGAUAA GCcgaaagGCGaGuCaaGGuCu CAGGACAA | 4354 |
| 390 | UGUCUGCG G CGUUUUAU | 1675 | AUAAAACG GCcgaaagGCGaGuCaaGGuCu CGCAGACA | 4355 |
| 392 | UCUGCGGC G UUUUAUCA | 1676 | UGAUAAAA GCcgaaagGCGaGuCaaGGuCu GCCGCAGA | 4356 |
| 442 | UCUUGUUG G UUCUUCUG | 1677 | CAGAAGAA GCcgaaagGCGaGuCaaGGuCu CAACAAGA | 4357 |
| 461 | CUAUCAAG G UAUGUUGC | 1678 | GCAACAUA GCcgaaagGCGaGuCaaGGuCu CUUGAUAG | 4358 |
| 472 | UGUUGCCC G UUUGUCCU | 1679 | AGGACAAA GCcgaaagGCGaGuCaaGGuCu CGGCAACA | 4359 |
| 650 | AACAACCA G CACCGGAC | 1680 | GUCCGGUG GCcgaaagGCGaGuCaaGGuCu UGGUUGUU | 4360 |
| 625 | CAUCUUGG G CUUUCGCA | 1681 | UGCGAAAG GCcgaaagGCGaGuCaaGGuCu CCAAGAUG | 4361 |
| 648 | CUAUGGGA G UGGGCCUC | 1682 | GAGGCCCA GCcgaaagGCGaGuCaaGGuCu UCCCAUAG | 4362 |
| 652 | GGGAGUGG G CCUCAGUC | 1683 | GACUGAGG GCcgaaagGCGaGuCaaGGuCu CCACUCCC | 4363 |
| 658 | GGGCCUCA G UCCGUUUC | 1684 | GAAACGGA GCcgaaagGCGaGuCaaGGuCu UGAGGCCC | 4364 |
| 662 | CUCAGUCC G UUUCUCUU | 1685 | AAGAGAAA GCcgaaagGCGaGuCaaGGuCu GGACUGAG | 4365 |
| 672 | UUCUCUUG G CUCAGUUU | 1686 | AAACUGAG GCcgaaagGCGaGuCaaGGuCu CAAGAGAA | 4366 |
| 677 | UUGGCUCA G UUUACUAG | 1687 | CUAGUAAA GCcgaaagGCGaGuCaaGGuCu UGAGCCAA | 4367 |
| 685 | GUUUACUA G UGCCAUUU | 1688 | AAAUGGCA GCcgaaagGCGaGuCaaGGuCu UAGUAAAC | 4368 |
| 699 | UUUGUUCA G UGGUUCGU | 1689 | ACGAACCA GCcgaaagGCGaGuCaaGGuCu UGAACAAA | 4369 |
| 702 | GUUCAGUG G UUCGUAGG | 1690 | CCUACGAA GCcgaaagGCGaGuCaaGGuCu CACUGAAC | 4370 |
| 706 | AGUGGUUC G UAGGGCUU | 1691 | AAGCCCUA GCcgaaagGCGaGuCaaGGuCu GAACCACU | 4371 |
| 711 | UUCGUAGG G CUUUCCCC | 1692 | GGGGAAAG GCcgaaagGCGaGuCaaGGuCu CCUACGAA | 4372 |
| 729 | ACUGUCUG G CUUUCAGU | 1693 | ACUGAAAG GCcgaaagGCGaGuCaaGGuCu CAGACAGU | 4373 |
| 736 | GGCUUUCA G UUAUAUGG | 1694 | CCAUAUAA GCcgaaagGCGaGuCaaGGuCu UGAAAGCC | 4374 |
| 753 | AUGAUGUG G UUUUGGGG | 1695 | CCCCAAAA GCcgaaagGCGaGuCaaGGuCu CACAUCAU | 4375 |
| 762 | UUUUGGGG G CCAAGUCU | 1696 | AGACUUGG GCcgaaagGCGaGuCaaGGuCu CCCCAAAA | 4376 |
| 767 | GGGGCCAA G UCUGUACA | 1697 | UGUACAGA GCcgaaagGCGaGuCaaGGuCu UUGGCCCC | 4377 |
| 785 | CAUCUUGA G UCCCUUUA | 1698 | UAAAGGGA GCcgaaagGCGaGuCaaGGuCu UCAAGAUG | 4378 |
| 826 | GUCUUUGG G UAUACAUU | 1699 | AAUGUAUA GCcgaaagGCGaGuCaaGGuCu CCAAAGAC | 4379 |
| 898 | AAUUGGGA G UUGGGGCA | 1700 | UGCCCCAA GCcgaaagGCGaGuCaaGGuCu UCCCAAUU | 4380 |
| 904 | GAGUUGGG G CACAUUGC | 1701 | GCAAUGUG GCcgaaagGCGaGuCaaGGuCu CCCAACUC | 4381 |
| 971 | GUAAACAG G CCUAUUGA | 1702 | UCAAUAGG GCcgaaagGCGaGuCaaGGuCu CUGUUUAC | 4382 |
| 987 | AUUGGAAA G UAUGUCAA | 1703 | UUGACAUA GCcgaaagGCGaGuCaaGGuCu UUUCCAAU | 4383 |
| 1006 | AAUUGUGG G UCUUUUGG | 1704 | CCAAAAGA GCcgaaagGCGaGuCaaGGuCu CCACAAUU | 4384 |
| 1016 | CUUUUGGG G UUUGCCGC | 1705 | GCGGCAAA GCcgaaagGCGaGuCaaGGuCu CCCAAAAG | 4385 |
| 1080 | GCAUACAA G CAAAACAG | 1706 | CUGUUUUG GCcgaaagGCGaGuCaaGGuCu UUGUAUGC | 4386 |
| 1089 | CAAAACAG G CUUUUACU | 1707 | AGUAAAAG GCcgaaagGCGaGuCaaGGuCu CUGUUUUG | 4387 |
| 1116 | CUUACAAG G CCUUUCUA | 1708 | UAGAAAGG GCcgaaagGCGaGuCaaGGuCu CUUGUAAG | 4388 |
| 1126 | CUUUCUAA G UAAACAGU | 1709 | ACUGUUUA GCcgaaagGCGaGuCaaGGuCu UUAGAAAG | 4389 |
| 1133 | AGUAAACA G UAUGUGAA | 1710 | UUCACAUA GCcgaaagGCGaGuCaaGGuCu UGUUUACU | 4390 |
| 1152 | UUUACCCC G UUGCUCGG | 1711 | CCGAGCAA GCcgaaagGCGaGuCaaGGuCu GGGGUAAA | 4391 |
| 1160 | GUUGCUCG G CAACGGCC | 1712 | GGCCGUUG GCcgaaagGCGaGuCaaGGuCu CGAGCAAC | 4392 |
| 1166 | CGGCAACG G CCUGGUCU | 1713 | AGACCAGG GCcgaaagGCGaGuCaaGGuCu CGUUGCCG | 4393 |
| 1171 | ACGGCCUG G UCUAUGCC | 1714 | GGCAUAGA GCcgaaagGCGaGuCaaGGuCu CAGGCCGU | 4394 |
| 1182 | UAUGCCAA G UGUUUGCU | 1715 | AGCAAACA GCcgaaagGCGaGuCaaGGuCu UUGGCAUA | 4395 |
| 1207 | CCCCACUG G UUGGGGCU | 1716 | AGCCCCAA GCcgaaagGCGaGuCaaGGuCu CACUGGGG | 4396 |
| 1213 | UGGUUGGG G CUUGGCCA | 1717 | UGGCCAAG GCcgaaagGCGaGuCaaGGuCu CCCAACCA | 4397 |
| 1218 | GGGGCUUG G CCAUAGGC | 1718 | GCCUAUGG GCcgaaagGCGaGuCaaGGuCu CAAGCCCC | 4398 |
| 1225 | GGCCAUAG G CCAUCAGC | 1719 | GCUGAUGG GCcgaaagGCGaGuCaaGGuCu CUAUGGCC | 4399 |
| 1232 | GGCCAUCA G CGCAUGCG | 1720 | CGCAUGCG GCcgaaagGCGaGuCaaGGuCu UGAUGGCC | 4400 |
| 1240 | GCGCAUGC G UGGAACCU | 1721 | AGGUUCCA GCcgaaagGCGaGuCaaGGuCu GCAUGCGC | 4401 |
| 1287 | AACUCCUA G CCGCUUGU | 1722 | ACAAGCGG GCcgaaagGCGaGuCaaGGuCu UAGGAGUU | 4402 |
| 1306 | UGCUCGCA G CAGGUCUG | 1723 | CAGACCUG GCcgaaagGCGaGuCaaGGuCu UGCGAGCA | 4403 |
| 1310 | CGCAGCAG G UCUGGGGC | 1724 | GCCCCAGA GCcgaaagGCGaGuCaaGGuCu CUGCUGCG | 4404 |
| 1317 | GGUCUGGG G CAAAACUC | 1725 | GAGUUUUG GCcgaaagGCGaGuCaaGGuCu CCCAGACC | 4405 |
| 1347 | AUUCUGUC G UGCUCUCC | 1726 | GGAGAGCA GCcgaaagGCGaGuCaaGGuCu GACAGAAU | 4406 |
| 1379 | UUUCCAUG G CUGCUAGG | 1727 | CCUAGCAG GCcgaaagGCGaGuCaaGGuCu CAUGGAAA | 4407 |
| 1387 | GCUGCUAG G CUGUGCUG | 1728 | CAGCACAG GCcgaaagGCGaGuCaaGGuCu CUAGCAGC | 4408 |
| 1418 | CGCGGGAC G UCCUUUGU | 1729 | ACAAAGGA GCcgaaagGCGaGuCaaGGuCu GUCCCGCG | 4409 |
| 1431 | UUGUUUAC G UCCCGUCG | 1730 | CGACGGGA GCcgaaagGCGaGuCaaGGuCu GUAAACAA | 4410 |
| 1436 | UACGUCCC G UCGGCGCU | 1731 | AGCGCCGA GCcgaaagGCGaGuCaaGGuCu GGGACGUA | 4411 |
| 1440 | UCCCGUCG G CGCUGAAU | 1732 | AUUCAGCG GCcgaaagGCGaGuCaaGGuCu CGACGGGA | 4412 |
| 1471 | CUCCCGGG G CCGCUUGG | 1733 | CCAAGCGG GCcgaaagGCGaGuCaaGGuCu CCCGGGAG | 4413 |
| 1481 | CGCUUGGG G CUCUACCG | 1734 | CGGUAGAG GCcgaaagGCGaGuCaaGGuCu CCCAAGCG | 4414 |
| 1517 | UACCGACC G UCCACGGG | 1735 | CCCGUGGA GCcgaaagGCGaGuCaaGGuCu GGUCGGUA | 4415 |
| 1526 | UCCACGGG G CGCACCUC | 1736 | GAGGUGCG GCcgaaagGCGaGuCaaGGuCu CCCGUGGA | 4416 |
| 1553 | GACUCCCC G UCUGUGCC | 1737 | GGCACAGA GCcgaaagGCGaGuCaaGGuCu GGGGAGUC | 4417 |
| 1579 | GCCGGACC G UGUGCACU | 1738 | AGUGCACA GCcgaaagGCGaGuCaaGGuCu GGUCCGGC | 4418 |
| 1605 | CUCUGCAC G UCGCAUGG | 1739 | CCAUGCGA GCcgaaagGCGaGuCaaGGuCu GUGCAGAG | 4419 |
| 1622 | AGACCACC G UGAACGCC | 1740 | GGCGUUCA GCcgaaagGCGaGuCaaGGuCu GGUGGUCU | 4420 |
| 1649 | UGCCCAAG G UCUUGCAU | 1741 | AUGCAAGA GCcgaaagGCGaGuCaaGGuCu CUUGGGCA | 4421 |
| 1679 | GACUUUCA G CAAUGUCA | 1742 | UGACAUUG GCcgaaagGCGaGuCaaGGuCu UGAAAGUC | 4422 |
| 1703 | ACCUUGAG G CAUACUUC | 1743 | GAAGUAUG GCcgaaagGCGaGuCaaGGuCu CUCAAGGU | 4423 |
| 1732 | UUUAAUGA G UGGGAGGA | 1744 | UCCUCCCA GCcgaaagGCGaGuCaaGGuCu UCAUUAAA | 4424 |
| 1741 | UGGGAGGA G UUGGGGGA | 1745 | UCCCCCAA GCcgaaagGCGaGuCaaGGuCu UCCUCCCA | 4425 |
| 1754 | GGGAGGAG G UUAGGUUA | 1746 | UAACCUAA GCcgaaagGCGaGuCaaGGuCu CUCCUCCC | 4426 |
| 1759 | GAGGUUAG G UUAAAGGU | 1747 | ACCUUUAA GCcgaaagGCGaGuCaaGGuCu CUAACCUC | 4427 |
| 1766 | GGUUAAAG G UCUUUGUA | 1748 | UACAAAGA GCcgaaagGCGaGuCaaGGuCu CUUUAACC | 4428 |
| 1782 | ACUAGGAG G CUGUAGGC | 1749 | GCCUACAG GCcgaaagGCGaGuCaaGGuCu CUCCUAGU | 4429 |
| 1789 | GGCUGUAG G CAUAAAUU | 1750 | AAUUUAUG GCcgaaagGCGaGuCaaGGuCu CUACAGCC | 4430 |
| 1799 | AUAAAUUG G UGUGUUCA | 1751 | UGAACACA GCcgaaagGCGaGuCaaGGuCu CAAUUUAU | 4431 |
| 1811 | GUUCACCA G CACCAUGC | 1752 | GCAUGGUG GCcgaaagGCGaGuCaaGGuCu UGGUGAAC | 4432 |
| 1870 | CUGUUCAA G CCUCCAAG | 1753 | CUUGGAGG GCcgaaagGCGaGuCaaGGuCu UUGAACAG | 4433 |
| 1878 | GCCUCCAA G CUGUGCCU | 1754 | AGGCACAG GCcgaaagGCGaGuCaaGGuCu UUGGAGGC | 4434 |
| 1890 | UGCCUUGG G UGGCUUUG | 1755 | CAAAGCCA GCcgaaagGCGaGuCaaGGuCu CCAAGGCA | 4435 |
| 1893 | CUUGGGUG G CUUUGGGG | 1756 | CCCCAAAG GCcgaaagGCGaGuCaaGGuCu CACCCAAG | 4436 |
| 1901 | GCUUUGGG G CAUGGACA | 1757 | UGUCCAUG GCcgaaagGCGaGuCaaGGuCu CCCAAAGC | 4437 |
| 1917 | AUUGACCC G UAUAAAGA | 1758 | UCUUUAUA GCcgaaagGCGaGuCaaGGuCu GGGUCAAU | 4438 |
| 1933 | AAUUUGGA G CUUCUGUG | 1759 | CACAGAAG GCcgaaagGCGaGuCaaGGuCu UCCAAAUU | 4439 |
| 1944 | UCUGUGGA G UCACUCUC | 1760 | GAGAGUAA GCcgaaagGCGaGuCaaGGuCu UCCACAGA | 4440 |
| 2023 | AUCGGGGG G CCUUAGAG | 1761 | CUCUAAGG GCcgaaagGCGaGuCaaGGuCu CCCCCGAU | 4441 |
| 2031 | GCCUUAGA G UCUCCGGA | 1762 | UCCGGAGA GCcgaaagGCGaGuCaaGGuCu UCUAAGGC | 4442 |
| 2062 | ACCAUACG G CACUCAGG | 1763 | CCUGAGUG GCcgaaagGCGaGuCaaGGuCu CGUAUGGU | 4443 |
| 2070 | GCACUCAG G CAAGCUAU | 1764 | AUACGUUG GCcgaaagGCGaGuCaaGGuCu CUGAGUGC | 4444 |
| 2074 | UCAGGCAA G CUAUUCUG | 1765 | CAGAAUAG GCcgaaagGCGaGuCaaGGuCu UUGCCUGA | 4445 |
| 2090 | GUGUUGGG G UGAGUUGA | 1766 | UCAACUCA GCcgaaagGCGaGuCaaGGuCu CCCAACAC | 4446 |
| 2094 | UGGGGUGA G UUGAUGAA | 1767 | UUCAUCAA GCcgaaagGCGaGuCaaGGuCu UCACCCCA | 4447 |
| 2107 | UGAAUCUA G CCACCUGG | 1768 | CCAGGUGG GCcgaaagGCGaGuCaaGGuCu UAGAUUCA | 4448 |
| 2116 | CCACCUGG G UGGGAAGU | 1769 | ACUUCCCA GCcgaaagGCGaGuCaaGGuCu CCAGGUGG | 4449 |
| 2123 | GGUGGGAA G UAAUUUGG | 1770 | CCAAAUUA GCcgaaagGCGaGuCaaGGuCu UUCCCACC | 4450 |
| 2140 | AAGAUCCA G CAUCCAGG | 1771 | CCUGGAUG GCcgaaagGCGaGuCaaGGuCu UGGAUCUU | 4451 |
| 2155 | GGGAAUUA G UAGUCAGC | 1772 | GCUGACUA GCcgaaagGCGaGuCaaGGuCu UAAUUCCC | 4452 |
| 2158 | AAUUAGUA G UCAUGUAU | 1773 | AUAGCUGA GCcgaaagGCGaGuCaaGGuCu UACUAAUU | 4453 |
| 2162 | AGUAGUCA G CUAUGUCA | 1774 | UGACAUAG GCcgaaagGCGaGuCaaGGuCu UGACUACU | 4454 |
| 2173 | AUGUCAAC G UUAAUAUG | 1775 | CAUAUUAA GCcgaaagGCGaGuCaaGGuCu GUUGACAU | 4455 |
| 2183 | UAAUAUGG G CCUAAAAA | 1776 | UUUUUAGG GCcgaaagGCGaGuCaaGGuCu CCAUAUUA | 4456 |
| 2208 | CUAUUGUG G UUUCACAU | 1777 | AUGUGAAA GCcgaaagGCGaGuCaaGGuCu CACAAUAG | 4457 |
| 2235 | ACUUUUGG G CGAGAAAC | 1778 | GUUUCUCG GCcgaaagGCGaGuCaaGGuCu CCAAAAGU | 4458 |
| 2260 | AAUAUUUG G UGUCUUUU | 1779 | AAAAGACA GCcgaaagGCGaGuCaaGGuCu CAAAUAUU | 4459 |
| 2272 | CUUUUGGA G UGUGGAUU | 1780 | AAUCCACA GCcgaaagGCGaGuCaaGGuCu UCCAAAAG | 4460 |
| 2360 | ACGAAGAG G CAGGUCCC | 1781 | GGGACCUG GCcgaaagGCGaGuCaaGGuCu CUCUUCGU | 4461 |
| 2364 | AGAGGCAG G UCCCCUAG | 1782 | CUAGGGGA GCcgaaagGCGaGuCaaGGuCu CUGCCUCU | 4462 |
| 2403 | AGACGAAG G UCUCAAUC | 1783 | GAUUGAGA GCcgaaagGCGaGuCaaGGuCu CUUCGUCU | 4463 |
| 2417 | AUCGCCGC G UCGCAGAA | 1784 | UUCUGCGA GCcgaaagGCGaGuCaaGGuCu GCGGCGAU | 4464 |
| 2454 | CAAUGUUA G UAUUCCUU | 1785 | AAGGAAUA GCcgaaagGCGaGuCaaGGuCu UAACAUUG | 4465 |
| 2474 | CACAUAAG G UGGGAAAC | 1786 | GUUUCCCA GCcgaaagGCGaGuCaaGGuCu CUUAUGUG | 4466 |
| 2491 | UUUACGGG G CUUUAUUC | 1787 | GAAUAAAG GCcgaaagGCGaGuCaaGGuCu CCCGUAAA | 4467 |
| 2507 | CUUCUACG G UACCUUGC | 1788 | GCAAGGUA GCcgaaagGCGaGuCaaGGuCu CGUAGAAG | 4468 |
| 2530 | CCUAAAUG G CAAACUCC | 1789 | GGAGUUUG GCcgaaagGCGaGuCaaGGuCu CAUUUAGG | 4469 |
| 2587 | AGAUGUAA G CAAUUUGU | 1790 | ACAAAUUG GCcgaaagGCGaGuCaaGGuCu UUACAUCU | 4470 |
| 2599 | UUUGUGGG G CCCCUUAC | 1791 | GUAAGGGG GCcgaaagGCGaGuCaaGGuCu CCCACAAA | 4471 |
| 2609 | CCCUUACA G UAAAUGAA | 1792 | UUCAUUUA GCcgaaagGCGaGuCaaGGuCu UGUAAGGG | 4472 |
| 2650 | CCUGCUAG G UUUUAUCC | 1793 | GGAUAAAA GCcgaaagGCGaGuCaaGGuCu CUAGCAGG | 4473 |
| 2701 | AUCAAACC G UAUUAUCC | 1794 | GGAUAAUA GCcgaaagGCGaGuCaaGGuCu GGUUUGAU | 4474 |
| 2713 | UAUCCAGA G UAUGUAGU | 1795 | ACUACAUA GCcgaaagGCGaGuCaaGGuCu UCUGGAUA | 4475 |
| 2720 | AGUAUGUA G UUAAUCAU | 1796 | AUGAUUAA GCcgaaagGCGaGuCaaGGuCu UACAUACU | 4476 |
| 2768 | UUUGGAAG G CGGGGAUC | 1797 | GAUCCCCG GCcgaaagGCGaGuCaaGGuCu CUUCCAAA | 4477 |
| 2791 | AAAAGAGA G UCCACACG | 1798 | CGUGUGGA GCcgaaagGCGaGuCaaGGuCu UCUCUUUU | 4478 |
| 2799 | GUCCACAC G UAGCGCCU | 1799 | AGGCGCUA GCcgaaagGCGaGuCaaGGuCu GUCUGGAC | 4479 |
| 2802 | CACACGUA G CGCCUCAU | 1800 | AUGAGGCG GCcgaaagGCGaGuCaaGGuCu UACGUGUG | 4480 |
| 2818 | UUUUGCGG G UCACCAUA | 1801 | UAUGGUGA GCcgaaagGCGaGuCaaGGuCu CCGCAAAA | 4481 |
| 2848 | GAUCUACA G CAUGGGAG | 1802 | CUCCCAUG GCcgaaagGCGaGuCaaGGuCu UGUAGAUC | 4482 |
| 2857 | CAUGGGAG G UUGGUCUU | 1803 | AAGACCAA GCcgaaagGCGaGuCaaGGuCu CUCCCAUG | 4483 |
| 2861 | GGAGGUUG G UCUUCCAA | 1804 | UUGGAAGA GCcgaaagGCGaGuCaaGGuCu CAACCUCC | 4484 |
| 2881 | UCGAAAAG G CAUGGGGA | 1805 | UCCCCAUG GCcgaaagGCGaGuCaaGGuCu CUUUUCGA | 4485 |
| 2936 | GAUCAUCA G UUGGACCC | 1806 | GGGUCCAA GCcgaaagGCGaGuCaaGGuCu UGAUGAUC | 4486 |
| 2955 | CAUUCAAA G CCAACUCA | 1807 | UGAGUUGG GCcgaaagGCGaGuCaaGGuCu UUUGAAUG | 4487 |
| 2964 | CCAACUCA G UAAAUCCA | 1808 | UGGAUUUA GCcgaaagGCGaGuCaaGGuCu UGAGUUGG | 4488 |
| 3005 | GACAACUG G CCGGACGC | 1809 | GCGUCCGG GCcgaaagGCGaGuCaaGGuCu CAGUUGUC | 4489 |
| 3021 | CCAACAAG G UGGGAGUG | 1810 | CACUCCCA GCcgaaagGCGaGuCaaGGuCu CUUGUUGG | 4490 |
| 3027 | AGGUGGGA G UGGGAGCA | 1811 | UGCUCCCA GCcgaaagGCGaGuCaaGGuCu UCCCACCU | 4491 |
| 3033 | GAGUGGGA G CAUUCGGG | 1812 | CCCGAAUG GCcgaaagGCGaGuCaaGGuCu UCCCACUC | 4492 |
| 3041 | GCAUUCGG G CCAGGGUU | 1813 | AACCCUGG GCcgaaagGCGaGuCaaGGuCu CCGAAUGC | 4493 |
| 3047 | GGGCCAGG G UUCACCCC | 1814 | GGGGUGAA GCcgaaagGCGaGuCaaGGuCu CCUGGCCC | 4494 |
| 3077 | CUGUUGGG G UGGAGCCC | 1815 | GGGCUCCA GCcgaaagGCGaGuCaaGGuCu CCCAACAG | 4495 |
| 3082 | GGGGUGGA G CCCUCACG | 1816 | CGUGAGGG GCcgaaagGCGaGuCaaGGuCu UCCACCCC | 4496 |
| 3097 | CGCUCACG G CCUACUCA | 1817 | UGAGUAGG GCcgaaagGCGaGuCaaGGuCu CCUGAGCG | 4497 |
| 3117 | CUGUGCCA G CAGCUCCU | 1818 | AGGAGCUG GCcgaaagGCGaGuCaaGGuCu UGGCACAG | 4498 |
| 3120 | UGCCAGCA G CUCCUCCU | 1819 | AGGAGGAG GCcgaaagGCGaGuCaaGGuCu UGCUGGCA | 4499 |
| 3146 | ACCAAUCG G CAGUCAGG | 1820 | CCUGACUG GCcgaaagGCGaGuCaaGGuCu CGAUUGGU | 4500 |
| 3149 | AAUCGGCA G UCAGGAAG | 1821 | CUUCCUGA GCcgaaagGCGaGuCaaGGuCu UGCCGAUU | 4501 |
| 3158 | UCAGGAAG G CAGCCUAC | 1822 | GUAGGCUG GCcgaaagGCGaGuCaaGGuCu CUUCCUGA | 4502 |
| 3161 | GGAAGGCA G CCUACUCC | 1823 | GGAGUAGG GCcgaaagGCGaGuCaaGGuCu UGCCUUCC | 4503 |
| 3204 | AUCCUCAG G CCAUGCAG | 1824 | CUGCAUGG GCcgaaagGCGaGuCaaGGuCu CUGAGGAU | 4504 |

Input Sequence = AF100308.
Cut Site = YC/M or UC/U.
Stem Length = 8.
Core Sequence = GCcgaaagGCGaGuCaaGGuCu
AF100308 (Hepatitis B virus strain 2-18, 3215 bp)

[0252] TABLE IX
HUMAN HBV DNAZYME AND SUBSTRATE SEQUENCE

| Pos | Substrate | Seq ID | DNAzyme | Seq ID |
|---|---|---|---|---|
| 508 | CAACCAGC A CCGGACCA | 833 | TGGTCCGG GGCTAGCTACAACGA GCTGGTTG | 4505 |
| 1632 | GAACGCCC A CAGGAACC | 1096 | GGTTCCTG GGCTAGCTACAACGA GGGCGTTC | 4506 |
| 2992 | CAACCCGC A CAAGGACA | 1376 | TGTCCTTG GGCTAGCTACAACGA GCGGGTTG | 4507 |
| 61 | ACUUUCCU G CUGGUGGC | 1448 | GCCACCAG GGCTAGCTACAACGA AGCAAAGT | 4508 |
| 94 | UGAGCCCU G CUCAGAAU | 1450 | ATTCTGAG GGCTAGCTACAACGA AGGGCTCA | 4509 |
| 112 | CUGUCUCU G CCAUAUCG | 1451 | CGATATGG GGCTAGCTACAACGA AGAGACAG | 4510 |
| 169 | AGAACAUC G CAUCAGGA | 1454 | TCCTGATG GGCTAGCTACAACGA GATGTTCT | 4511 |
| 192 | GGACCCCU G CUCGUGUU | 1455 | AACACGAG GGCTAGCTACAACGA AGGGGTCC | 4512 |
| 315 | CAAAAUUC G CAGUCCCA | 1457 | TGGGACTG GGCTAGCTACAACGA GAATTTTG | 4513 |
| 374 | UGGUUAUC G CUGGAUGU | 1458 | ACATCCAG GGCTAGCTACAACGA GATAACCA | 4514 |
| 387 | AUGUGUCU G CGGCGUUU | 1459 | AAACGCCG GGCTAGCTACAACGA AGACACAT | 4515 |
| 410 | CUUCCUCU G CAUCCUGC | 1460 | GCAGGATG GGCTAGCTACAACGA AGAGGAAG | 4516 |
| 417 | UGCAUCCU G CUGCUAUG | 1461 | CATAGCAG GGCTAGCTACAACGA AGGATGCA | 4517 |
| 420 | AUCCUGCU G CUAUGCCU | 1462 | AGGCATAG GGCTAGCTACAACGA AGCAGGAT | 4518 |
| 425 | GCUGCUAU G CCUCAUCU | 1463 | AGATGAGG GGCTAGCTACAACGA ATAGCAGC | 4519 |
| 468 | GGUAUGUU G CCCGUUUG | 1464 | CAAACGGG GGCTAGCTACAACGA AACATACC | 4520 |
| 518 | CGGACCAU G CAAAACCU | 1465 | AGGTTTTG GGCTAGCTACAACGA ATGGTCCG | 4521 |
| 527 | CAAAACCU G CACAACUC | 1466 | GAUTTGTG GGCTAGCTACAACGA AGGTTTTG | 4522 |
| 538 | CAACUCCU G CUCAAGGA | 1467 | TCCTTGAG GGCTAGCTACAACGA AGGAGTTG | 4523 |
| 569 | CUCAUGUU G CUGUACAA | 1468 | TTGTACAG GGCTAGCTACAACGA AACATGAG | 4524 |
| 596 | CGGAAACU G CACCUGUA | 1469 | TACAGGTG GGCTAGCTACAACGA AGTTTCCG | 4525 |
| 631 | GGGCUUUC G CAAAAUAC | 1470 | GTATTTTG GGCTAGCTACAACGA GAAAGCCC | 4526 |
| 687 | UUACUAGU G CCAUUUGU | 1471 | ACAAATGG GGCTAGCTACAACGA ACTAGTAA | 4527 |
| 795 | CCCUUUAU G CCGCUGUU | 1474 | AACAGCGG GGCTAGCTACAACGA ATAAAGGG | 4528 |
| 798 | UUUAUGCC G CUGUUACC | 1475 | GGTAACAG GGCTAGCTACAACGA GGCATAAA | 4529 |
| 911 | GGCACAUU G CCACAGGA | 1476 | TCCTGTGG GGCTAGCTACAACGA AATGTGCC | 4530 |
| 1020 | UUGGGUUU G CCGCCCCU | 1479 | AGGGGCGG GGCTAGCTACAACGA AAACCCCA | 4531 |
| 1023 | GGUUUGCC G CCCCUUUC | 1480 | GAAAGGGG GGCTAGCTACAACGA GGCAAACC | 4532 |
| 1034 | CCUUUCAC G CAAUGUGG | 1481 | CCACATTG GGCTAGCTACAACGA GTGAAAGG | 4533 |
| 1050 | GAUAUUCU G CUUUAAUG | 1482 | CATTAAAG GGCTAGCTACAACGA AGAATATC | 4534 |
| 1058 | GCUUUAAU G CCUUUAUA | 1483 | TATAAAGG GGCTAGCTACAACGA ATTAAAGC | 4535 |
| 1068 | CUUUAUAU G CAUGCAUA | 1484 | TATGCATG GGCTAGCTACAACGA ATATAAAG | 4536 |
| 1072 | AUAUGCAU G CAUACAAG | 1485 | CTTGTATG GGCTAGCTACAACGA ATGCATAT | 4537 |
| 1103 | ACUUUCUC G CCAACUUA | 1486 | TAAGTTGG GGCTAGCTACAACGA GAGAAAGT | 4538 |
| 1155 | ACCCCGUU G CUCGGCAA | 1488 | TTGCCGAG GGCTAGCTACAACGA AACGGGGT | 4539 |
| 1177 | UGGUCUAU G CCAAGUGU | 1489 | ACACTTGG GGCTAGCTACAACGA ATAGACCA | 4540 |
| 1188 | AAGUGUUU G CUGACGCA | 1490 | TGCGTCAG GGCTAGCTACAACGA AAACACTT | 4541 |
| 1194 | UUGCUGAC G CAACCCCC | 1492 | GGGGGTTG GGCTAGCTACAACGA GTCAGCAA | 4542 |
| 1234 | CCAUCAGC G CAUGCGUG | 1493 | CACGCATG GGCTAGCTACAACGA GCTGATGG | 4543 |
| 1238 | CAGCGCAU G CGUGGAAC | 1494 | GTTCCACG GGCTAGCTACAACGA ATGCGCTG | 4544 |
| 1262 | UCUCCUCU G CCGAUCCA | 1495 | TGGATCGG GGCTAGCTACAACGA AGAGGAGA | 4545 |
| 1275 | UCCAUACC G CGGAACUC | 1497 | GAGTTCCG GGCTAGCTACAACGA GGTATGGA | 4546 |
| 1290 | UCCUAGCC G CUUGUUUU | 1498 | AAAACAAG GGCTAGCTACAACGA GGCTAGGA | 4547 |
| 1299 | CUUGUUUU G CUCGCAGC | 1499 | GCTGCGAG GGCTAGCTACAACGA AAAACAAG | 4548 |
| 1303 | UUUUGCUC G CAGCAGGU | 1500 | ACCTGCTG GGCTAGCTACAACGA GAGCAAAA | 4549 |
| 1349 | UCUGUCGU G CUCUCCCG | 1502 | CGGGAGAG GGCTAGCTACAACGA ACGACAGA | 4550 |
| 1357 | GCUCUCCC G CAAAUAUA | 1503 | TATATTTG GGCTAGCTACAACGA GGGAGAGC | 4551 |
| 1382 | CCAUGGCU G CUAGGCUG | 1504 | CAGCCTAG GGCTAGCTACAACGA AGCCATGG | 4552 |
| 1392 | UAGGCUGU G CUGCCAAC | 1505 | GTTGGCAG GGCTAGCTACAACGA ACAGCCTA | 4553 |
| 1395 | GCUGUGCU G CCAACUGG | 1506 | CCAGTTGC GGCTAGCTACAACGA AGCACAGC | 4554 |
| 1411 | GAUCCUAC G CGGGACGU | 1507 | ACGTCCCG GGCTAGCTACAACGA GTACCATC | 4555 |
| 1442 | CCGUCGGC G CUGAAUCC | 1508 | GGATTCAG GGCTAGCTACAACGA GCCGACGG | 4556 |
| 1452 | UGAAUCCC G CGGACGAC | 1510 | GTCGTCCG GGCTAGCTACAACGA GGGATTCA | 4557 |
| 1474 | CCGGGGCC G CUUGGGGC | 1512 | GCCCCAAG GGCTAGCTACAACGA GGCCCCGG | 4558 |
| 1489 | GCUCUACC G CCCGCUUC | 1513 | GAAGCGGG GGCTAGCTACAACGA CGTACAGC | 4559 |
| 1493 | UACCGCCC G CUUCUCCG | 1514 | CGGAGAAG GGCTAGCTACAACGA GGGCGGTA | 4560 |
| 1501 | GCUUCUCC G CCUAUUGU | 1515 | ACAATAGG GGCTAGCTACAACGA GGACAAGC | 4561 |
| 1528 | CACGGGGC G CACCUCUC | 1517 | GAGAGGTG GGCTAGCTACAACGA GCCCCGTG | 4562 |
| 1542 | CUCUUUAC G CGGACUCC | 1518 | GGAGTCCG GGCTAGCTACAACGA GTAAAGAG | 4563 |
| 1559 | CCGUCUGU G CCUUCUCA | 1519 | TGAGAAGG GGCTAGCTACAACGA ACAGACGG | 4564 |
| 1571 | UCUCAUCU G CCGGACCG | 1520 | CGGTCCGG GGCTAGCTACAACGA AGATGAGA | 4565 |
| 1583 | GACCGUGU G CACUUCGC | 1521 | GCGAAGTG GGCTAGCTACAACGA ACACGGTC | 4566 |
| 1590 | UGCACUUC G CUUCACCU | 1522 | AGGTGAAG GGCTAGCTACAACGA GAAGTGCA | 4567 |
| 1601 | UCACCUCU G CACGUCGC | 1523 | GCGACGTG GGCTAGCTACAACGA AGAGGTGA | 4568 |
| 1608 | UGCACGUC G CAUGGAGA | 1524 | TCTCCATG GGCTAGCTACAACGA GACGTGCA | 4569 |
| 1628 | CCGUGAAC G CCCACAGG | 1526 | CCTGTGGG GGCTAGCTACAACGA GTTCACGG | 4570 |
| 1642 | AGGAACCU G CCCAAGGU | 1527 | ACCTTGGG GGCTAGCTACAACGA AGGTTCCT | 4571 |
| 1654 | AAGGUCUU G CAUAAGAG | 1528 | CTCTTATG GGCTAGCTACAACGA AAGACCTT | 4572 |
| 1818 | AGCACCAU G CAACUUUU | 1533 | AAAAGTTG GGCTAGCTACAACGA ATGGTGCT | 4573 |
| 1835 | UCACCUCU G CCUAAUCA | 1534 | TGATTAGG GGCTAGCTACAACGA AGAGGTGA | 4574 |
| 1883 | CAAGCUGU G CCUUGGGU | 1535 | ACCCAAGG GGCTAGCTACAACGA ACAGCTTG | 4575 |
| 1959 | UCUUUUUU G CCUUCUGA | 1537 | TCAGAAGG GGCTAGCTACAACGA AAAAAAGA | 4576 |
| 2002 | UCGACACC G CCUCUGCU | 1541 | AGCAGAGG GGCTAGCTACAACGA GGTGTCGA | 4577 |
| 2008 | CCGCCUCU G CUCUGUAU | 1542 | ATACAGAG GGCTAGCTACAACGA AGAGGCGG | 4578 |
| 2282 | GUGGAUUC G CACUCCUC | 1548 | GAGGAGTG GGCTAGCTACAACGA GAATCCAC | 4579 |
| 2293 | CUCCUCCU G CAUAUAGA | 1549 | TCTATATG GGCTAGCTACAACGA AGGAGGAG | 4580 |
| 2311 | CACCAAAU G CCCCUAUC | 1550 | GATAGGGG GGCTAGCTACAACGA ATTTGGTG | 4581 |
| 2388 | ACUCCCUC G CCUCGCAG | 1552 | CTGCGAGG GGCTAGCTACAACGA GAGGGAGT | 4582 |
| 2393 | CUCGCCUC G CAGACGAA | 1553 | TTCGTCTG GGCTAGCTACAACGA GAGGCGAG | 4583 |
| 2412 | UCUCAAUC G CCGCGUCG | 1555 | CGACGCGG GGCTAGCTACAACGA GATTGAGA | 4584 |
| 2415 | CAAUCGCC G CGUCGCAG | 1556 | CTGCGACG GGCTAGCTACAACGA GGCGATTG | 4585 |
| 2420 | GCCGCGUC G CAGAAGAU | 1557 | ATCTTCTG GGCTAGCTACAACGA GACGCGGC | 4586 |
| 2514 | GGUACCUU G CUUUAAUC | 1558 | GATTAAAG GGCTAGCTACAACGA AAGGTACC | 4587 |
| 2560 | AUUCAUUU G CAGGAGGA | 1560 | TCCTCCTG GGCTAGCTACAACGA AAATGAAT | 4588 |
| 2641 | UUAACUAU G CCUGCUAG | 1563 | CTAGCAGG GGCTAGCTACAACGA ATAGTTAA | 4589 |
| 2645 | CUAUGCCU G CUAGGUUU | 1564 | AAACCTAG GGCTAGCTACAACGA AGGCATAG | 4590 |
| 2677 | AAAUAUUU G CCCUUAGA | 1565 | TCTAAGGG GGCTAGCTACAACGA AAATATTT | 4591 |
| 2740 | UUCCAGAC G CGACAUUA | 1566 | TAATGTCG GGCTAGCTACAACGA GTCTGGAA | 4592 |
| 2804 | CACGUAGC G CCUCAUUU | 1568 | AAATGAGG GGCTAGCTACAACGA GCTACGTG | 4593 |
| 2814 | CUCAUUUU G CGGGUCAC | 1569 | GTGACCCG GGCTAGCTACAACGA AAAATGAG | 4594 |
| 2946 | UGGACCCU G CAUUCAAA | 1572 | TTTGAATG GGCTAGCTACAACGA AGGGTCCA | 4595 |
| 2990 | CUCAACCC G CACAAGGA | 1573 | TCCTTGTG GGCTAGCTACAACGA GGGTTGAG | 4596 |
| 3012 | GGCCGGAC G CCAACAAG | 1574 | CTTGTTGG GGCTAGCTACAACGA GTCCGGCC | 4597 |
| 3090 | GCCCUCAC G CUCAGGGC | 1575 | GCCCTGAG GGCTAGCTACAACGA GTGAGGGC | 4598 |
| 3113 | ACAACUGU G CCAGCAGC | 1576 | GCTGCTGG GGCTAGCTACAACGA ACAGTTGT | 4599 |
| 3132 | CUCCUCCU G CCUCCACC | 1577 | GGTGGAGG GGCTAGCTACAACGA AGGAGGAG | 4600 |
| 51 | AGGGCCCU G UACUUUCC | 1578 | GGAAAGTA GGCTAGCTACAACGA AGGGCCCT | 4601 |
| 106 | AGAAUACU G UCUCUGCC | 1579 | GGCAGAGA GGCTAGCTACAACGA AGTATTCT | 4602 |
| 148 | GGGACCCU G UACCGAAC | 1580 | GTTCGGTA GGCTAGCTACAACGA AGGGTCCC | 4603 |
| 198 | CUGCUCGU G UUACAGGC | 1581 | GCCTGTAA GGCTAGCTACAACGA ACGAGCAG | 4604 |
| 219 | UUUUUCUU G UUGACAAA | 1582 | TTTGTCAA GGCTAGCTACAACGA AAGAAAAA | 4605 |
| 297 | ACACCCGU G UGUCUUCG | 1583 | CCAAGACA GGCTAGCTACAACGA ACGGGTGT | 4606 |
| 299 | ACCCGUGU G UCUUGGCC | 1584 | GGCCAAGA GGCTAGCTACAACGA ACACGGGT | 4607 |
| 347 | ACCAACCU G UUGUCCUC | 1585 | GAGGACAA GGCTAGCTACAACGA AGGTTGGT | 4608 |
| 350 | AACCUGUU G UCCUCCAA | 1586 | TTGGAGGA GGCTAGCTACAACGA AACAGGTT | 4609 |
| 362 | UCCAAUUU G UCCUGGUU | 1587 | AACCAGGA GGCTAGCTACAACGA AAATTGGA | 4610 |
| 381 | CGCUGGAU G UGUCUGCG | 1588 | CGCAGACA GGCTAGCTACAACGA ATCCAGCG | 4611 |
| 383 | CUGGAUGU G UCUGCGGC | 1589 | GCCGCAGA GGCTAGCTACAACGA ACATCCAG | 4612 |
| 438 | AUCUUCUU G UUGGUUCU | 1590 | AGAACCAA GGCTAGCTACAACGA AAGAAGAT | 4613 |
| 465 | CAAGGUAU G UUGCCCGU | 1591 | ACGGGCAA GGCTAGCTACAACGA ATACCTTG | 4614 |
| 476 | GCCCGUUU G UCCUCUAA | 1592 | TTAGAGGA GGCTAGCTACAACGA AAACGGGC | 4615 |
| 555 | ACCUCUAU G UUUCCCUC | 1593 | GAGGGAAA GGCTAGCTACAACGA ATAGAGGT | 4616 |
| 566 | UCCCUCAU G UUGCUGUA | 1594 | TACAGCAA GGCTAGCTACAACGA ATGAGGGA | 4617 |
| 572 | AUGUUGCU G UACAAAAC | 1595 | GTTTTGTA GGCTAGCTACAACGA AGCAACAT | 4618 |
| 602 | CUGCACCU G UAUUCCCA | 1596 | TGGGAATA GGCTAGCTACAACGA AGGTGCAG | 4619 |
| 694 | UGCCAUUU G UUCAGUGG | 1597 | CCACTGAA GGCTAGCTACAACGA AAATGGCA | 4620 |
| 724 | CCCCCACU G UCUGGCUU | 1598 | AAGCCAGA GGCTAGCTACAACGA AGTGGGGG | 4621 |
| 750 | UGGAUGAU G UGGUUUUG | 1599 | CAAAACCA GGCTAGCTACAACGA ATCATCCA | 4622 |
| 771 | CCAAGUCU G UACAACAU | 1600 | ATGTTGTA GGCTAGCTACAACGA AGACTTGG | 4623 |
| 801 | AUGCCGCU G UUACCAAU | 1601 | ATTGGTAA GGCTAGCTACAACGA AGCGGCAT | 4624 |
| 818 | UUUCUUUU G UCUUUGGG | 1602 | CCCAAAGA GGCTAGCTACAACGA AAAAGAAA | 4625 |
| 888 | UGGGAUAU G UAAUUGGG | 1603 | CCCAATTA GGCTAGCTACAACGA ATATCCCA | 4626 |
| 927 | AACAUAUU G UACAAAAA | 1604 | TTTTTGTA GGCTAGCTACAACGA AATATGTT | 4627 |
| 944 | AUCAAAAU G UGUUUUAG | 1605 | CTAAAACA GGCTAGCTACAACGA ATTTTGAT | 4628 |
| 946 | CAAAAUGU G UUUUAGGA | 1606 | TCCTAAAA GGCTAGCTACAACGA ACATTTTG | 4629 |
| 963 | AACUUCCU G UAAACAGG | 1607 | CCTGTTTA GGCTAGCTACAACGA AGGAAGTT | 4630 |
| 991 | GAAAGUAU G UCAACGAA | 1608 | TTCGTTGA GGCTAGCTACAACGA ATACTTTC | 4631 |
| 1002 | AACGAAUU G UGGGUCUU | 1609 | AAGACCCA GGCTAGCTACAACGA AATTCGTT | 4632 |
| 1039 | CACGCAAU G UGGAUAUU | 1610 | AATATCCA GGCTAGCTACAACGA ATTGCGTG | 4633 |
| 1137 | AACAGUAU G UGAACCUU | 1611 | AAGGTTCA GGCTAGCTACAACGA ATACTGTT | 4634 |
| 1184 | UGCCAAGU G UUUGCUGA | 1612 | TCAGCAAA GGCTAGCTACAACGA ACTTGGCA | 4635 |
| 1251 | GAACCUUU G UGUCUCCU | 1613 | AGGAGACA GGCTAGCTACAACGA TAAGGTTC | 4636 |
| 1253 | ACCUUUGU G UCUCCUCU | 1614 | AGAGGAGA GGCTAGCTACAACGA ACAAAGGT | 4637 |
| 1294 | AGCCGCUU G UUUUGCUC | 1615 | GAGCAAAA GGCTAGCTACAACGA AAGCGGCT | 4638 |
| 1344 | ACAAUUCU G UCGUGCUC | 1616 | GAGCACGA GGCTAGCTACAACGA AGAATTGT | 4639 |
| 1390 | GCUAGGCU G UGCUGCCA | 1617 | TGGCAGCA GGCTAGCTACAACGA AGCCTAGC | 4640 |
| 1425 | CGUCCUUU G UUUACGUC | 1618 | GACGTAAA GGCTAGCTACAACGA AAAGGACG | 4641 |
| 1508 | CGCCUAUU G UACCGACC | 1619 | GGTCGGTA GGCTAGCTACAACGA AATAGGCG | 4642 |
| 1557 | CCCCGUCU G UGCCUUCU | 1620 | AGAAGGCA GGCTAGCTACAACGA AGACGGGG | 4643 |
| 1581 | CGGACCGU G UGCACUUC | 1621 | GAAGTGCA GGCTAGCTACAACGA ACCGTCCG | 4644 |
| 1684 | UCAGCAAU G UCAACGAC | 1622 | GTCGTTGA GGCTAGCTACAACGA ATTGCTGA | 4645 |
| 1719 | CAAAGACU G UGUGUUUA | 1623 | TAAACACA GGCTAGCTACAACGA AGTCTTTG | 4646 |
| 1721 | AAGACUGU G UGUUUAAU | 1624 | ATTAAACA GGCTAGCTACAACGA ACAGTCTT | 4647 |
| 1723 | GACUGUGU G UUUAAUGA | 1625 | TCATTAAA GGCTAGCTACAACGA ACACAGTC | 4648 |
| 1772 | AGGUCUUU G UACUAGGA | 1626 | TCCTAGTA GGCTAGCTACAACGA AAACACCT | 4649 |
| 1785 | AGGAGGCU G UAGGCAUA | 1627 | TATCCCTA GGCTAGCTACAACGA ACCCTCCT | 4650 |
| 1801 | AAAUUGGU G UGUUCACC | 1628 | GGTGAACA GGCTAGCTACAACGA ACCAATTT | 4651 |
| 1803 | AUUGGUGU G UUCACCAG | 1629 | CTGGTGAA GGCTAGCTACAACGA ACACCAAT | 4652 |
| 1850 | CAUCUCAU G UUCAUGUC | 1630 | GACATGAA GGCTAGCTACAACGA ATGAGATG | 4653 |
| 1856 | AUGUUCAU G UCCUACUG | 1631 | CAGTAGGA GGCTAGCTACAACGA ATGAACAT | 4654 |
| 1864 | GUCCUACU G UUCAAGCC | 1632 | GGCTTGAA GGCTAGCTACAACGA AGTAGGAC | 4655 |
| 1881 | UCCAAGCU G UGCCUUGG | 1633 | CCAAGGCA GGCTAGCTACAACGA AGCTTGGA | 4656 |
| 1939 | GAGCUUCU G UGGAGUUA | 1634 | TAACTCCA GGCTAGCTACAACGA AGAAGCTC | 4657 |
| 2013 | UCUGCUCU G UAUCGGGG | 1635 | CCCCGATA GGCTAGCTACAACGA AGAGCAGA | 4658 |
| 2045 | GGAACAUU G UUCACCUC | 1636 | GAGGTGAA GGCTAGCTACAACGA AATGTTCC | 4659 |
| 2082 | GCUAUUCU G UGUUGGGG | 1637 | CCCCAACA GGCTAGCTACAACGA AGAATAGC | 4660 |
| 2084 | UAUUCUGU G UUGGGGUG | 1638 | CACCCCAA GGCTAGCTACAACGA ACAGAATA | 4661 |
| 2167 | UCAGCUAU G UCAACGUU | 1639 | AACGTTGA GGCTAGCTACAACGA ATAGCTGA | 4662 |
| 2205 | CAACUAUU G UGGUCUCA | 1640 | TGAAACCA GGCTAGCTACAACGA AATAGTTG | 4663 |
| 2222 | CAUUUCCU G UCUUACUU | 1641 | AAGTAAGA GGCTAGCTACAACGA AGGAAATG | 4664 |
| 2245 | GAGAAACU G UUCUUGAA | 1642 | TTCAAGAA GGCTAGCTACAACGA AGTTTCTC | 4665 |
| 2262 | UAUUUGGU G UCUUUUGG | 1643 | CCAAAAGA GGCTAGCTACAACGA ACCAAATA | 4666 |
| 2274 | UUUGGAGU G UGGAUUCG | 1644 | CGAATCCA GGCTAGCTACAACGA ACTCCAAA | 4667 |
| 2344 | AAACUACU G UUGUUAGA | 1645 | TCTAACAA GGCTAGCTACAACGA AGTAGTTT | 4668 |
| 2347 | CUACUGUU G UUAGACGA | 1646 | TCGTCTAA GGCTAGCTACAACGA AACAGTAG | 4669 |
| 2450 | AUCUCAAU G UUAGUAUU | 1647 | AATACTAA GGCTAGCTACAACGA ATTGAGAT | 4670 |
| 2573 | AGGACAUC G UUGAUAGA | 1648 | TCTATCAA GGCTAGCTACAACGA AATGTCCT | 4671 |
| 2583 | UGAUAGAU G UAAGCAAU | 1649 | ATTGCTTA GGCTAGCTACAACGA ATCTATCA | 4672 |
| 2594 | AGCAAUUU G UGGGGCCC | 1650 | GGGCCCCA GGCTAGCTACAACGA AAATTGCT | 4673 |
| 2663 | AUCCCAAU G UUACUAAA | 1651 | TTATGTAA GGCTAGCTACAACGA ATTGGGAT | 4674 |
| 2717 | CAGAGUAU G UAGUUAAU | 1652 | ATTAACTA GGCTAGCTACAACGA ATACTCTG | 4675 |
| 2901 | AUCUUUCU G UCCCCAAU | 1653 | ATTGGGGA GGCTAGCTACAACGA AGAAAGAT | 4676 |
| 3071 | GGGGGACU G UUGFGGUG | 1654 | CACCCCAA GGCTAGCTACAACGA AGTCCCCC | 4677 |
| 3111 | UCACAACU G UGCCAGCA | 1655 | TGCTGGCA GGCTAGCTACAACGA AGTTGTGA | 4678 |
| 40 | AUCCCAGA G UCAGGGCC | 1656 | GGCCCTGA GGCTAGCTACAACGA TCTGGGAT | 4679 |
| 46 | GAGUCAGG G CCCUGUAC | 1657 | GTACAGGG GGCTAGCTACAACGA CCTGACTC | 4680 |
| 65 | UCCUGCUG G UGGCUCCA | 1658 | TGGAGCCA GGCTAGCTACAACGA CAGCAGGA | 4681 |
| 68 | UGCUGGUG G CUCCAGUU | 1659 | AACTGGAG GGCTAGCTACAACGA CACCAGCA | 4682 |
| 74 | UGGCUCCA G UUCAGGAA | 1660 | TTCCTGAA GGCTAGCTACAACGA TGGAGCCA | 4683 |
| 85 | CAGGAACA G UGAGCCCU | 1661 | AGGGCTCA GGCTAGCTACAACGA TGTTCCTG | 4684 |
| 89 | AACAGUGA G CCCUGCUC | 1662 | GAGCAGGG GGCTAGCTACAACGA TCACTGTT | 4685 |
| 120 | GCCAUAUC G UCAAUCUU | 1663 | AAGATTGA GGCTAGCTACAACGA GATATGGC | 4686 |
| 196 | CCCUGCUC G UGUUACAG | 1664 | CTGTAACA GGCTAGCTACAACGA GAGCAGGG | 4687 |
| 205 | UGUUACAG G CGGGGUUU | 1665 | AAACCCCG GGCTAGCTACAACGA CTGTAACA | 4688 |
| 210 | CAGGCGGG G UUUUUCUU | 1666 | AAGAAAAA GGCTAGCTACAACGA CCCGCCTG | 4689 |
| 248 | ACCACAGA G UCUAGACU | 1667 | AGTCTAGA GGCTAGCTACAACGA TCTGTGGT | 4690 |
| 258 | CUAGACUC G UGGUGGAC | 1668 | GTCCACCA GGCTAGCTACAACGA GAGTCTAG | 4691 |
| 261 | GACUCGUG G UGGACUUC | 1669 | GAAGTCCA GGCTAGCTACAACGA CACGAGTC | 4692 |
| 295 | GAACACCC G UGUGUCUU | 1670 | AAGACACA GGCTAGCTACAACGA GGGTGTTC | 4693 |
| 305 | GUGUCUUG G CCAAAAUU | 1671 | AATTTTGG GGCTAGCTACAACGA CAAGACAC | 4694 |
| 318 | AAUUCGCA G UCCCAAAU | 1672 | ATTTGGGA GGCTAGCTACAACGA TGCGAATT | 4695 |
| 332 | AAUCUCCA G UCACUCAC | 1673 | GTGAGTGA GGCTAGCTACAACGA TGGAGATT | 4696 |
| 368 | UUGUCCUG G UUAUCGCU | 1674 | AGCGATAA GGCTAGCTACAACGA CAGGACAA | 4697 |
| 390 | UGUCUGCG G CGUUUUAU | 1675 | ATAAAACG GGCTAGCTACAACGA CGCAGACA | 4698 |
| 392 | UCUGCGGC G UUUUAUCA | 1676 | TGATAAAA GGCTAGCTACAACGA GCCGCAGA | 4699 |
| 442 | UCUUGUUG G UUCUUCUG | 1677 | CAGAAGAA GGCTAGCTACAACGA CAACAAGA | 4700 |
| 461 | CUAUCAAG G UAUGUUGC | 1678 | GCAACATA GGCTAGCTACAACGA CTTGATAG | 4701 |
| 472 | UGUUGCCC G UUUGUCCU | 1679 | AGGACAAA GGCTAGCTACAACGA GGGCAACA | 4702 |
| 506 | AACAACCA G CACCGGAC | 1680 | GTCCGGTG GGCTAGCTACAACGA TGGTTGTT | 4703 |
| 625 | CAUCUUGG G CUUUCGCA | 1681 | TGCGAAAG GGCTAGCTACAACGA CCAAGATG | 4704 |
| 648 | CUAUGGGA G UGGGCCUC | 1682 | GAGGCCCA GGCTAGCTACAACGA TCCCATAG | 4705 |
| 652 | GGGAGUGG G CCUCAGUC | 1683 | GACTGAGG GGCTAGCTACAACGA CCACTCCC | 4706 |
| 658 | GGGCCUCA G UCCGUUUC | 1684 | GAAACGGA GGCTAGCTACAACGA TGAGGCCC | 4707 |
| 662 | CUCAGUCC G UUUCUCUU | 1685 | AAGAGAAA GGCTAGCTACAACGA GGACTGAG | 4708 |
| 672 | UUCUCUUG G CUCAGUUU | 1686 | AAACTGAG GGCTAGCTACAACGA CAAGAGAA | 4709 |
| 677 | UUGGCUCA G UUUACUAG | 1687 | CTAGTAAA GGCTAGCTACAACGA TGAGCCAA | 4710 |
| 685 | GUUUACUA G UGCCAUUU | 1688 | AAATGGCA GGCTAGCTACAACGA TAGTAAAC | 4711 |
| 699 | UUUGUUCA G UGGUUCGU | 1689 | ACGAACCA GGCTAGCTACAACGA TGAACAAA | 4712 |
| 702 | GUUCAGUG G UUCGUAGG | 1690 | CCTACGAA GGCTAGCTACAACGA CACTGAAC | 4713 |
| 706 | AGUGGUUC G UAGGGCUU | 1691 | AAGCCCTA GGCTAGCTACAACGA GAACCACT | 4714 |
| 711 | UUCGUAGG G CUUUCCCC | 1692 | GGGGAAAG GGCTAGCTACAACGA CCTACGAA | 4715 |
| 729 | ACUGUCUG G CUUUCAGU | 1693 | ACTGAAAG GGCTAGCTACAACGA CAGACAGT | 4716 |
| 736 | GGCUUUCA G UUAUAUGG | 1694 | CCATATAA GGCTAGCTACAACGA TGAAAGCC | 4717 |
| 753 | AUGAUGUG G UUUUGGGG | 1695 | CCCCAAAA GGCTAGCTACAACGA CACATCAT | 4718 |
| 762 | UUUUGGGG G CCAAGUCU | 1696 | AGACTTGG GGCTAGCTACAACGA CCCCAAAA | 4719 |
| 767 | GGGGCCAA G UCUGUACA | 1697 | TGTACAGA GGCTAGCTACAACGA TTGGCCCC | 4720 |
| 785 | CAUCUUGA G UCCCUUUA | 1698 | TAAAGGGA GGCTAGCTACAACGA TCAAGATG | 4721 |
| 826 | GUCUUUGG G UAUACAUU | 1699 | AATGTATA GGCTAGCTACAACGA CCAAAGAC | 4722 |
| 898 | AAUUGGGA G UUGGGGCA | 1700 | TGCCCCAA GGCTAGCTACAACGA TCCCAATT | 4723 |
| 904 | GAGUUGGG G CACAUUGC | 1701 | GCAATGTC GGCTAGCTACAACGA CCCAACTC | 4724 |
| 971 | GUAAACAG G CCUAUUGA | 1702 | TCAATAGG GGCTAGCTACAACGA CTGTTTAC | 4725 |
| 987 | AUUGGAAA G UAUGUCAA | 1703 | TTGACATA GGCTAGCTACAACGA TTTCCAAT | 4726 |
| 1006 | AAUUGUGG G UCUUUUGG | 1704 | CCAAAAGA GGCTAGCTACAACGA CCACAATT | 4727 |
| 1016 | CUUUUGGG G UUUGCCGC | 1705 | GCGGCAAA GGCTAGCTACAACGA CCCAAAAG | 4728 |
| 1080 | GCAUACAA G CAAAACAG | 1706 | CTGTTTTG GGCTAGCTACAACGA TTGTATGC | 4729 |
| 1089 | CAAAACAG G CUUUUACU | 1707 | AGTAAAAG GGCTAGCTACAACGA CTGTTTTG | 4730 |
| 1116 | CUUACAAG G CCUUUCUA | 1708 | TAGAAAGG GGCTAGCTACAACGA CTTGTAAG | 4731 |
| 1126 | CUUUCUAA G UAAACAGU | 1709 | ACTGTTTA GGCTAGCTACAACGA TTAGAAAG | 4732 |
| 1133 | AGUAAACA G UAUGUGAA | 1710 | TTCACATA GGCTAGCTACAACGA TGTTTACT | 4733 |
| 1152 | UUUACCCC G UUGCUCGG | 1711 | CCGAGCAA GGCTAGCTACAACGA GGGGTAAA | 4734 |
| 1160 | GUUGCUCG G CAACGGCC | 1712 | GGCCGTTG GGCTAGCTACAACGA CGAGCAAC | 4735 |
| 1166 | CGGCAACG G CCUGGUCU | 1713 | AGACCAGG GGCTAGCTACAACGA CGTTGCCG | 4736 |
| 1171 | ACGGCCUG G UCUAUGCC | 1714 | GGCATAGA GGCTAGCTACAACGA CAGGCCGT | 4737 |
| 1182 | UAUGCCAA G UGUUUGCU | 1715 | AGCAAACA GGCTAGCTACAACGA TTGGCATA | 4738 |
| 1207 | CCCCACUG G UUGGGGCU | 1716 | AGCCCCAA GGCTAGCTACAACGA CAGTGGGG | 4739 |
| 1213 | UGGUUGGG G CUUGGCCA | 1717 | TGGCCAAG GGCTAGCTACAACGA CCCAACCA | 4740 |
| 1218 | GGGGCUUG G CCAUAGGC | 1718 | GCCTATGG GGCTAGCTACAACGA CAAGCCCC | 4741 |
| 1225 | GGCCAUAG G CCAUCAGC | 1719 | GCTGATGG GGCTAGCTACAACGA CTATGGCC | 4742 |
| 1232 | GGCCAUCA G CGCAUGCG | 1720 | CGCATGCG GGCTAGCTACAACGA TGATGGCC | 4743 |
| 1240 | GCGCAUGC G UGGAACCU | 1721 | AGGTTCCA GGCTAGCTACAACGA GCATGCGC | 4744 |
| 1287 | AACUCCUA G CCGCUUGU | 1722 | ACAAGCGG GGCTAGCTACAACGA TAGGAGTT | 4745 |
| 1306 | UGCUCGCA G CAGGUCUG | 1723 | CAGACCTG GGCTAGCTACAACGA TGCGAGCA | 4746 |
| 1310 | CGCAGCAG G UCUGGGGC | 1724 | GCCCCAGA GGCTAGCTACAACGA CTGCTGCG | 4747 |
| 1317 | CGUCUGGG G CAAAACUC | 1725 | GAGTTTTG GGCTAGCTACAACGA CCCAGACC | 4748 |
| 1347 | AUUCUGUC G UGCUCUCC | 1726 | GGAGAGCA GGCTAGCTACAACGA GACAGAAT | 4749 |
| 1379 | UUUCCAUG G CUGCUAGG | 1727 | CCTAGCAG GGCTAGCTACAACGA CATGGAAA | 4750 |
| 1387 | GCUGCUAG G CUGUGCUG | 1728 | CAGCACAG GGCTAGCTACAACGA CTAGCAGC | 4751 |
| 1418 | CGCGGGAC G UCCUUUGU | 1729 | ACAAAGGA GGCTAGCTACAACGA GTCCCGCG | 4752 |
| 1431 | UUGUUUAC G UCCCGUCG | 1730 | CGACGGGA GGCTAGCTACAACGA GTAAACAA | 4753 |
| 1436 | UACGUCCC G UCGGCGCU | 1731 | AGCGCCGA GGCTAGCTACAACGA GGGACGTA | 4754 |
| 1440 | UCCCGUCG G CGCUGAAU | 1732 | ATTCAGCG GGCTAGCTACAACGA CGACGGGA | 4755 |
| 1471 | CUCCCGGG G CCGCUUGG | 1733 | CCAAGCGG GGCTAGCTACAACGA CCCGGGAG | 4756 |
| 1481 | CGCUUGGG G CUCUACCG | 1734 | CGGTAGAG GGCTAGCTACAACGA CCCAAGCG | 4757 |
| 1517 | UACCGACC G UCCACGGG | 1735 | CCCGTGGA GGCTAGCTACAACGA GGTCGGTA | 4758 |
| 1526 | UCCACGGG G CGCACCUC | 1736 | GACGTGCG GGCTAGCTACAACGA CCCGTGGA | 4759 |
| 1553 | GACUCCCC G UCUGUGCC | 1737 | GGCACAGA GGCTAGCTACAACGA GGGGAGTC | 4760 |
| 1579 | GCCGGACC G UGUGCACU | 1738 | AGTGCACA GGCTAGCTACAACGA GGTCCGGC | 4761 |
| 1605 | CUCUGCAC G UCGCAUGG | 1739 | CCATGCGA GGCTAGCTACAACGA GTGCAGAG | 4762 |
| 1622 | AGACCACC G UGAACGCC | 1740 | GGCGTTCA GGCTAGCTACAACGA GGTGGTCT | 4763 |
| 1649 | UGCCCAAG G UCUUGCAU | 1741 | ATGCAAGA GGCTAGCTACAACGA CTTGGGCA | 4764 |
| 1679 | GACUUUCA G CAAUGUCA | 1742 | TGACATTG GGCTAGCTACAACGA TGAAAGTC | 4765 |
| 1703 | ACCUUGAG G CAUACUUC | 1743 | GAAGTATG GGCTAGCTACAACGA CTCAAGGT | 4766 |
| 1732 | UUUAAUGA G UGGGAGGA | 1744 | TCCTCCCA GGCTAGCTACAACGA TCATTAAA | 4767 |
| 1741 | UGGGAGGA G GUGGGGGA | 1745 | TCCCCCAA GGCTAGCTACAACGA TCCTCCCA | 4768 |
| 1754 | GGGAGGAG G UUAGGUUA | 1746 | TAACCTAA GGCTAGCTACAACGA CTCCTCCC | 4769 |
| 1759 | GAGGUUAG G UUAAAGGU | 1747 | ACCTTTAA GGCTAGCTACAACGA CTAACCTC | 4770 |
| 1766 | GGUUAAAG G UCUUUGUA | 1748 | TACAAAGA GGCTAGCTACAACGA CTTTAACC | 4771 |
| 1782 | ACUAGGAG G CUGUAGGC | 1749 | GCCTACAG GGCTAGCTACAACGA CTCCTAGT | 4772 |
| 1789 | GCCUCUAG G CAUAAAUU | 1750 | AATTTATG GGCTAGCTACAACGA CTACAGCC | 4773 |
| 1799 | AUAAAUUG G UGUGUUCA | 1751 | TGAACACA GGCTAGCTACAACGA CAATTTAT | 4774 |
| 1811 | GUUCACCA G CACCAUGC | 1752 | GCATGGTG GGCTAGCTACAACGA TGGTGAAC | 4775 |
| 1870 | CUGUUCAA G CCUCCAAG | 1753 | CTTGGAGG GGCTAGCTACAACGA TTGAACAG | 4776 |
| 1878 | GCCUCCAA G CUGUGCCU | 1754 | AGGCACAG GGCTAGCTACAACGA TTGGAGGC | 4777 |
| 1890 | UGCCUUGG G UGGCUUUG | 1755 | CAAAGCCA GGCTAGCTACAACGA CCAAGGCA | 4778 |
| 1893 | CUUGGGUG G CUUUGGGG | 1756 | CCCCAAAG GGCTAGCTACAACGA CACCCAAG | 4779 |
| 1901 | GCUUUGGG G CAUGGACA | 1757 | TGTCCATG GGCTAGCTACAACGA CCCAAAGC | 4780 |
| 1917 | AUUGACCC G UAUAAAGA | 1758 | TCTTTATA GGCTAGCTACAACGA GGGTCAAT | 4781 |
| 1933 | AAUUUGGA G CUUCUGUG | 1759 | CACAGAAG GGCTAGCTACAACGA TCCAAATT | 4782 |
| 1944 | UCUGUGGA G GUACUCUC | 1760 | GAGAGTAA GGCTAGCTACAACGA TCCACAGA | 4783 |
| 2023 | AUCGGGGG G CCUUAGAG | 1761 | CTCTAAGG GGCTAGCTACAACGA CCCCCGAT | 4784 |
| 2031 | GCCUUAGA G UCUCCGGA | 1762 | TCCGGAGA GGCTAGCTACAACGA TCTAAGGC | 4785 |
| 2062 | ACCAUACG G CACUCAGG | 1763 | CCTGAGTG GGCTAGCTACAACGA CGTATGGT | 4786 |
| 2070 | GCACUCAG G CAAGCUAU | 1764 | ATAGCTTG GGCTAGCTACAACGA CTGAGTGC | 4787 |
| 2074 | UCAGGCAA G CUAUUCUG | 1765 | CAGAATAG GGCTAGCTACAACGA TTGCCTGA | 4788 |
| 2090 | GUGUUGGG G UGAGUUGA | 1766 | TCAACTCA GGCTAGCTACAACGA CCCAACAC | 4789 |
| 2094 | UGGGGUGA G UUGAUGAA | 1767 | TTCATCAA GGCTAGCTACAACGA TCACCCCA | 4790 |
| 2107 | UGAAUCUA G CCACCUGG | 1768 | CCAGGTGG GGCTAGCTACAACGA TAGATTCA | 4791 |
| 2116 | CCACCUGG G UGGGAAGU | 1769 | ACTTCCCA GGCTAGCTACAACGA CCAGGTGG | 4792 |
| 2123 | GGUGGGAA G UAAUUUGG | 1770 | CCAAATTA GGCTAGCTACAACGA TTCCCACC | 4793 |
| 2140 | AAGAUCCA G CAUCCAGG | 1771 | CCTGGATG GGCTAGCTACAACGA TGGATCTT | 4794 |
| 2155 | GGGAAUUA G UAGUCAGC | 1772 | GCTGACTA GGCTAGCTACAACGA TAATTCCC | 4795 |
| 2158 | AAUUAGUA G UCAGCUAU | 1773 | ATAGCTGA GGCTAGCTACAACGA TACTAATT | 4796 |
| 2162 | AGUAGUCA G CUAUGUCA | 1774 | TGACATAG GGCTAGCTACAACGA TGACTACT | 4797 |
| 2173 | AUGUCAAC G UUAAUAUG | 1775 | CATATTAA GGCTAGCTACAACGA GTTGACAT | 4798 |
| 2183 | UAAUAUGG G CCUAAAAA | 1776 | TTTTTAGG GGCTAGCTACAACGA CCATATTA | 4799 |
| 2208 | CUAUUGUG G UUUCACAU | 1777 | ATGTGAAA GGCTAGCTACAACGA CACAATAG | 4800 |
| 2235 | ACUUUUGG G CGAGAAAC | 1778 | GTTTCTCG GGCTAGCTACAACGA CCAAAAGT | 4801 |
| 2260 | AAUAUUUG G UGUCUUUU | 1779 | AAAAGACA GGCTAGCTACAACGA CAAATATT | 4802 |
| 2272 | CUUUUGGA G UGUGGAUU | 1780 | AATCCACA GGCTAGCTACAACGA TCCAAAAG | 4803 |
| 2360 | ACGAAGAG G CAGGUCCC | 1781 | GGGACCTG GGCTAGCTACAACGA CTCTTCGT | 4804 |
| 2364 | AGAGGCAG G UCCCCUAG | 1782 | CTAGGGGA GGCTAGCTACAACGA CTGCCTCT | 4805 |
| 2403 | AGACGAAG G UCUCAAUC | 1783 | GATTGAGA GGCTAGCTACAACGA CTTCGTCT | 4806 |
| 2417 | AUCGCCGC G UCGCAGAA | 1784 | TTCTGCGA GGCTAGCTACAACGA GCGGCGAT | 4807 |
| 2454 | CAAUGUUA G UAUUCCUU | 1785 | AAGGAATA GGCTAGCTACAACGA TAACATTG | 4808 |
| 2474 | CACAUAAG G UGGGAAAC | 1786 | GTTTCCCA GGCTAGCTACAACGA CTTATGTG | 4809 |
| 2491 | UUUACGGG G CUUUAUUC | 1787 | GAATAAAG GGCTAGCTACAACGA CCCGTAAA | 4810 |
| 2507 | CUUCUACG G UACCUUGC | 1788 | GCAAGGTA GGCTAGCTACAACGA CGTAGAAG | 4811 |
| 2530 | CCUAAAUG G CAAACUCC | 1789 | GGAGTTTG GGCTAGCTACAACGA CATTTAGG | 4812 |
| 2587 | AGAUGUAA G CAAUUUGU | 1790 | ACAAATTG GGCTAGCTACAACGA TTACATCT | 4813 |
| 2599 | UUUGUGGG G CCCCUUAC | 1791 | GTAAGGGG GGCTAGCTACAACGA CCCACAAA | 4814 |
| 2609 | CCCUUACA G UAAAUGAA | 1792 | TTCATTTA GGCTAGCTACAACGA TGTAAGGG | 4815 |
| 2650 | CCUGCUAG G UUUUAUCC | 1793 | GGATAAAA GGCTAGCTACAACGA CTAGCAGG | 4816 |
| 2701 | AUCAAACC G UAUUAUCC | 1794 | GGATAATA GGCTAGCTACAACGA GGTTTGAT | 4817 |
| 2713 | UAUCCAGA G UAUGUAGU | 1795 | ACTACATA GGCTAGCTACAACGA TCTGGATA | 4818 |
| 2720 | AGUAUGUA G UUAAUCAU | 1796 | ATGATTAA GGCTAGCTACAACGA TACATACT | 4819 |
| 2768 | UUUGGAAG G CGGGGAUC | 1797 | GATCCCCG GGCTAGCTACAACGA CTTCCAAA | 4820 |
| 2791 | AAAAGAGA G UCCACACG | 1798 | CGTGTGGA GGCTAGCTACAACGA TCTCTTTT | 4821 |
| 2799 | GUCCACAC G UAGCGCCU | 1799 | AGGCGCTA GGCTAGCTACAACGA GTGTGGAC | 4822 |
| 2802 | CACACGUA G CGCCUCAU | 1800 | ATGAGGCG GGCTAGCTACAACGA TACGTGTC | 4823 |
| 2818 | UUUUGCGG G UCACCAUA | 1801 | TATGGTGA GGCTAGCTACAACGA CCGCAAAA | 4824 |
| 2848 | GAUCUACA G CAUGGGAG | 1802 | CTCCCATG GGCTAGCTACAACGA TGTAGATC | 4825 |
| 2857 | CAUGGGAG G UUGGUCUU | A803 | AAGACCAA GGCTAGCTACAACGA CTCCCATG | 4826 |
| 2861 | GGAGGUUG G UCUUCCAA | 1804 | TTGGAAGA GGCTAGCTACAACGA CAACCTCC | 4827 |
| 2881 | UCGAAAAG G CAUGGGGA | 1805 | TCCCCATG GGCTAGCTACAACGA CTTTTCGA | 4828 |
| 2936 | GAUCAUCA G UUGGACCC | 1806 | GGGTCCAA GGCTAGCTACAACGA TGATGATC | 4829 |
| 2955 | CAUUCAAA G CCAACUCA | 1807 | TGAGTTGG GGCTAGCTACAACGA TTTGAATG | 4830 |
| 2964 | CCAACUCA G UAAAUCCA | 1808 | TGGATTTA GGCTAGCTACAACGA TGAGTTGG | 4831 |
| 3005 | GACAACUG G CCGGACGC | 1809 | GCGTCCGG GGCTAGCTACAACGA CAGTTGTC | 4832 |
| 3021 | CCAACAAG G UGGGAGUG | 1810 | CACTCCCA GGCTAGCTACAACGA CTTGTTGG | 4833 |
| 3027 | AGGUGGGA G UGGGAGCA | 1811 | TGCTCCCA GGCTAGCTACAACGA TCCCACCT | 4834 |
| 3033 | GAGUGGGA G CAUUCGGG | 1812 | CCCGAATG GGCTAGCTACAACGA TCCCACTC | 4835 |
| 3041 | GCAUUCGG G CCAGGGUU | 1813 | AACCCTGG GGCTAGCTACAACGA CCGAATGC | 4836 |
| 3047 | GGGCCAGG G UUCACCCC | 1814 | GGGGTGAA GGCTAGCTACAACGA CCTGGCCC | 4837 |
| 3077 | CUGUUGGG G UGGAGCCC | 1815 | GGGCTCCA GGCTAGCTACAACGA CCCAACAG | 4838 |
| 3082 | GGGGUGGA G CCCUCACG | 1816 | CGTGAGGG GGCTAGCTACAACGA TCCACCCC | 4839 |
| 3097 | CGCUCAGG G CCUACUCA | 1817 | TGAGTAGG GGCTAGCTACAACGA CCTGAGCG | 4840 |
| 3117 | CUGUGCCA G CAGCUCCU | 1818 | AGGAGCTG GGCTAGCTACAACGA TGGCACAG | 4841 |
| 3120 | UGCCAGCA G CUCCUCCU | 1819 | AGGAGGAG GGCTAGCTACAACGA TGCTGGCA | 4842 |
| 3146 | ACCAAUCG G CAGUCAGG | 1820 | CCTGACTG GGCTAGCTACAACGA CGATTGGT | 4843 |
| 3149 | AAUCGGCA G UCAGGAAG | 1821 | CTTCCTGA GGCTAGCTACAACGA TGCCGATT | 4844 |
| 3158 | UCAGGAAG G CAGCCUAC | 1822 | GTAGGCTG GGCTAGCTACAACGA CTTCCTGA | 4845 |
| 3161 | GGAAGGCA G CCUACUCC | 1823 | GGAGTAGG GGCTAGCTACAACGA TGCCTTCC | 4846 |
| 3204 | AUCCUCAG G CCAUGCAG | 1824 | CTGCATGG GGCTAGCTACAACGA CTGAGGAT | 4847 |
| 10 | ACUCCACC A CUUUCCAC | 1825 | GTGGAAAG GGCTAGCTACAACGA GGTGGAGT | 4848 |
| 17 | CACUUUCC A CCAAACUC | 1826 | GAGTTTGG GGCTAGCTACAACGA GGAAAGTG | 4849 |
| 22 | UCCACCAA A CUCUUCAA | 1827 | TTGAAGAG GGCTAGCTACAACGA TTGGTGGA | 4850 |
| 32 | UCUUCAAG A UCCCAGAG | 1828 | CTCTGGGA GGCTAGCTACAACGA CTTGAAGA | 4851 |
| 53 | GGCCCUGU A CUUUCCUG | 1829 | CAGGAAAG GGCTAGCTACAACGA ACAGGGCC | 4852 |
| 82 | GUUCAGGA A CAGUGAGC | 1830 | GCTCACTG GGCTAGCTACAACGA TCCTGAAC | 4853 |
| 101 | UGCUCAGA A UACUGUCU | 1831 | ACACAGTA GGCTAGCTACAACGA TCTGAGCA | 4854 |
| 103 | CUGAGAAU A CUGUCUCU | 1832 | AGAGACAG GGCTAGCTACAACGA ATTCTGAG | 4855 |
| 115 | UCUCUGCC A UAUCGUCA | 1833 | TGACGATA GGCTAGCTACAACGA GGCAGAGA | 4856 |
| 117 | UCUGCCAU A UCGUCAAU | 1834 | ATTGACGA GGCTAGCTACAACGA ATGGCAGA | 4857 |
| 124 | UAUCGUCA A UCUUAUCG | 1835 | CGATAAGA GGCTAGCTACAACGA TGACGATA | 4858 |
| 129 | UCAAUCUU A UCGAAGAC | 1836 | GTCTTCGA GGCTAGCTACAACGA AAGATTGA | 4859 |
| 136 | UAUCGAAG A CUGGGGAC | 1837 | GTCCCCAG GGCTAGCTACAACGA CTTCGATA | 4860 |
| 143 | GACUGGGG A CCCUGUAC | 1838 | GTACAGGG GGCTAGCTACAACGA CCCCAGTC | 4861 |
| 150 | GACCCUGU A CCGAACAU | 1839 | ATGTTCGG GGCTAGCTACAACGA ACAGGGTC | 4862 |
| 155 | UGUACCGA A CAUGGAGA | 1840 | TCTCCATG GGCTAGCTACAACGA TCGGTACA | 4863 |
| 157 | UACCGAAC A UGGAGAAC | 1841 | GTTCTCCA GGCTAGCTACAACGA GTTCGGTA | 4864 |
| 164 | CAUGGAGA A CAUCGCAU | 1842 | ATGCGATG GGCTAGCTACAACGA TCTCCATG | 4865 |
| 166 | UGGAGAAC A UCGCAUCA | 1843 | TGATGCGA GGCTAGCTACAACGA GTTCTCCA | 4866 |
| 171 | AACAUCGC A UCAGGACU | 1844 | AGTCCTGA GGCTAGCTACAACGA GCGATGTT | 4867 |
| 177 | GCAUCAGG A CUCCUAGG | 1845 | CCTAGGAG GGCTAGCTACAACGA CCTGATGC | 4868 |
| 186 | CUCCUAGG A CCCCUGCU | 1846 | AGCAGGGG GGCTAGCTACAACGA CCTAGGAG | 4869 |
| 201 | CUCGUGUU A CAGGCGGG | 1847 | CCCGCCTG GGCTAGCTACAACGA AACACGAG | 4870 |
| 223 | UCUUGUUG A CAAAAAUC | 1848 | GATTTTTG GGCTAGCTACAACGA CAACAAGA | 4871 |
| 229 | UGACAAAA A UCCUCACA | 1849 | TGTGAGGA GGCTAGCTACAACGA TTTTGTCA | 4872 |
| 235 | AAAUCCUC A CAAUACCA | 1850 | TGGTATTG GGCTAGCTACAACGA GAGGATTT | 4873 |
| 238 | UCCUCACA A UACCACAG | 1851 | CTGTGGTA GGCTAGCTACAACGA TGTGAGGA | 4874 |
| 240 | CUCACAAU A CCACAGAG | 1852 | CTCTGTGG GGCTAGCTACAACGA ATTGTGAG | 4875 |
| 243 | ACAAUACC A CAGAGUCU | 1853 | AGACTCTG GGCTAGCTACAACGA GGTATTGT | 4876 |
| 254 | GAGUCUAG A CUCGUGGU | 1854 | ACCACGAG GGCTAGCTACAACGA CTAGACTC | 4877 |
| 265 | CGUGGUGG A CUUCUCUC | 1855 | GAGAGAAG GGCTAGCTACAACGA CCACCACG | 4878 |
| 275 | GUCUCUCA A UUUUCUAG | 1856 | CTAGAAAA GGCTAGCTACAACGA TGAGAGAA | 4879 |
| 289 | UAGGGGGA A CACCCGUG | 1857 | CACGGGTG GGCTAGCTACAACGA TCCCCCTA | 4880 |
| 291 | GGGGGAAC A CCCGUGUG | 1858 | CACACGGG GGCTAGCTACAACGA GTTCCCCC | 4881 |
| 311 | UGGCCAAA A UUCGCAGU | 1859 | ACTGCGAA GGCTAGCTACAACGA TTTGGCCA | 4882 |
| 325 | AGUCCCAA A UCUCCAGU | 1860 | ACTGGAGA GGCTAGCTACAACGA TTGGGACT | 4883 |
| 335 | CUCCAGUC A CUCACCAA | 1861 | TTGGTGAG GGCTAGCTACAACGA GACTGGAG | 4884 |
| 339 | AGUCACUC A CCAACCUG | 1862 | CAGGTTGG GGCTAGCTACAACGA GAGTGACT | 4885 |
| 343 | ACUCACCA A CCUGUUGU | 1863 | ACAACAGG GGCTAGCTACAACGA TGGTGAGT | 4886 |
| 358 | GUCCUCCA A UUUGUCCU | 1864 | AGGACAAA GGCTAGCTACAACGA TGGAGGAC | 4887 |
| 371 | UCCUGGUU A UCGCUGGA | 1865 | TCCAGCGA GGCTAGCTACAACGA AACCAGGA | 4888 |
| 379 | AUCGCUGG A UGUGUCUG | 1866 | CAGACACA GGCTAGCTACAACGA CCAGCGAT | 4889 |
| 397 | GGCGUUUU A UCAUCUUC | 1867 | GAAGATGA GGCTAGCTACAACGA AAAACGCC | 4890 |
| 400 | GUUUUAUC A UCUUCCUC | 1868 | GAGGAAGA GGCTAGCTACAACGA GATAAAAC | 4891 |
| 412 | UCCUCUGC A UCCUGCUG | 1869 | CAGCAGGA GGCTAGCTACAACGA GCAGAGGA | 4892 |
| 423 | CUGCUGCU A UGCCUCAU | 1870 | ATGAGGCA GGCTAGCTACAACGA AGCAGCAG | 4893 |
| 430 | UAUGCCUC A UCUUCUUG | 1871 | CAAGAAGA GGCTAGCTACAACGA GAGGCATA | 4894 |
| 452 | UCUUCUGG A CUAUCAAG | 1872 | CTTGATAG GGCTAGCTACAACGA CCAGAAGA | 4895 |
| 455 | UCUGGACU A UCAAGGUA | 1873 | TACCTTGA GGCTAGCTACAACGA AGTCCAGA | 4896 |
| 463 | AUCAAGGU A UGUUGCCC | 1874 | GGGCAACA GGCTAGCTACAACGA ACCTTGAT | 4897 |
| 484 | GUCCUCUA A UUCCAGGA | 1875 | TCCTGGAA GGCTAGCTACAACGA TAGAGGAC | 4898 |
| 492 | AUUCCAGG A UCAUCAAC | 1876 | GTTGATGA GGCTAGCTACAACGA CCTGGAAT | 4899 |
| 495 | CCAGGAUC A UCAACAAC | 1877 | GTTGTTGA GGCTAGCTACAACGA GATCCTGG | 4900 |
| 499 | GAUCAUCA A CAACCAGC | 1878 | GCTGGTTG GGCTAGCTACAACGA TGATGATC | 4901 |
| 502 | CAUCAACA A CCAGCACC | 1879 | GGTGCTGG GGCTAGCTACAACGA TGTTGATG | 4902 |
| 513 | AGCACCGG A CCAUGCAA | 1880 | TTGCATGG GGCTAGCTACAACGA CCGGTGCT | 4903 |
| 516 | ACCGGACC A UGCAAAAC | 1881 | GTTTTGCA GGCTAGCTACAACGA GGTCCGGT | 4904 |
| 523 | CAUGCAAA A CCUGCACA | 1882 | TGTGCAGG GGCTAGCTACAACGA TTTGCATG | 4905 |
| 529 | AAACCUGC A CAACUCCU | 1883 | AGGAGTTG GGCTAGCTACAACGA GCAGGTTT | 4906 |
| 532 | CCUGCACA A CUCCUGCU | 1884 | AGCAGGAG GGCTAGCTACAACGA TGTGCAGG | 4907 |
| 547 | CUCAAGGA A CCUCUAUG | 1885 | CATAGAGG GGCTAGCTACAACGA TCCTTGAG | 4908 |
| 553 | GAACCUCU A UGUUUCCC | 1886 | GGGAAACA GGCTAGCTACAACGA AGAGGTTC | 4909 |
| 564 | UUUCCCUC A UGUUGCUG | 1887 | CAGCAACA GGCTAGCTACAACGA GAGGGAAA | 4910 |
| 574 | GUUGCUGU A CAAAACCU | 1888 | AGGTTTTG GGCTAGCTACAACGA ACAGCAAC | 4911 |
| 579 | UGUACAAA A CCUACGGA | 1889 | TCCGTAGG GGCTAGCTACAACGA TTTGTACA | 4912 |
| 583 | CAAAACCU A CGGACGGA | 1890 | TCCGTCCG GGCTAGCTACAACGA AGGTTTTG | 4913 |
| 587 | ACCUACGG A CGGAAACU | 1891 | AGTTTCCG GGCTAGCTACAACGA CCGTAGGT | 4914 |
| 593 | GGACGGAA A CUGCACCU | 1892 | ACGTGCAG GGCTAGCTACAACGA TTCCGTCC | 4915 |
| 598 | GAAACUGC A CCUGUAUU | 1893 | AATACAGG GGCTAGCTACAACGA GCAGTTTC | 4916 |
| 604 | GCACCUGU A UUCCCAUC | 1894 | GATGGGAA GGCTAGCTACAACGA ACAGGTGC | 4917 |
| 610 | GUAUUCCC A UCCCAUCA | 1895 | TGATGGGA GGCTAGCTACAACGA GGGAATAC | 4918 |
| 615 | CCCAUCCC A UCAUCUUG | 1896 | CAAGATGA GGCTAGCTACAACGA GGGATGGG | 4919 |
| 618 | AUCCCAUC A UCUUGGGC | 1897 | GCCCAAGA GGCTAGCTACAACGA GATGGGAT | 4920 |
| 636 | UUCGCAAA A UACCUAUG | 1898 | CATAGGTA GGCTAGCTACAACGA TTTGCGAA | 4921 |
| 638 | CGCAAAAU A CCUAUGGG | 1899 | CCCATAGG GGCTAGCTACAACGA ATTTTGCG | 4922 |
| 642 | AAAUACCU A UGGGAGUG | 1900 | CACTCCCA GGCTAGCTACAACGA AGGTATTT | 4923 |
| 681 | CUCAGUUU A CUAGUGCC | 1901 | GGCACTAG GGCTAGCTACAACGA AAACTTAG | 4924 |
| 690 | CUAGUGCC A UUUGUUCA | 1902 | TGAACAAA GGCTAGCTACAACGA GGCACTAG | 4925 |
| 721 | UUUCCCCC A CUGUCUGG | 1903 | CCAGACAG GGCTAGCTACAACGA GGGGGAAA | 4926 |
| 739 | UUUCAGUU A UAUGGAUG | 1904 | CATCCATA GGCTAGCTACAACGA AACTGAAA | 4927 |
| 741 | UCAGUUAU A UGGAUGAU | 1905 | ATCATCCA GGCTAGCTACAACGA ATAACTGA | 4928 |
| 745 | UUAUAUGG A UGAUGUGG | 1906 | CCACATCA GGCTAGCTACAACGA CCATATAA | 4929 |
| 748 | UAUGGAUG A UGUGGUUU | 1907 | AAACCACA GGCTAGCTACAACGA CATCCATA | 4930 |
| 773 | AAGUCUGU A CAACAUCU | 1908 | AGATGTTG GGCTAGCTACAACGA ACAGACTT | 4931 |
| 776 | UCUGUACA A CAUCUUGA | 1909 | TCAAGATG GGCTAGCTACAACGA TGTACAGA | 4932 |
| 778 | UGUACAAC A UCUUGAGU | 1910 | ACTCAAGA GGCTAGCTACAACGA GTTGTACA | 4933 |
| 793 | GUCCCUUU A UGCCGCUG | 1911 | CAGCGGCA GGCTAGCTACAACGA AAAGGGAC | 4934 |
| 804 | CCGCUGUU A CCAAUUUU | 1912 | AAAATTGG GGCTAGCTACAACGA AACAGCGG | 4935 |
| 808 | UGUUACCA A UUUUCUUU | 1913 | AAAGAAAA GGCTAGCTACAACGA TGGTAACA | 4936 |
| 828 | CUUUGGGU A UACAUUUA | 1914 | TAAATGTA GGCTAGCTACAACGA ACCCAAAG | 4937 |
| 830 | UUGGGUAU A CAUUUAAA | 1915 | TTTAAATG GGCTAGCTACAACGA ATACCCAA | 4938 |
| 832 | GGGUAUAC A UUUAAACC | 1916 | GGTTTAAA GGCTAGCTACAACGA GTATACCC | 4939 |
| 838 | ACAUUUAA A CCCUCACA | 1917 | TGTGAGGG GGCTAGCTACAACGA TTAAATGT | 4940 |
| 844 | AAACCCUC A CAAAACAA | 1918 | TTGTTTTG GGCTAGCTACAACGA GAGGGTTT | 4941 |
| 849 | CUCACAAA A CAAAAAGA | 1919 | TCTTTTTG GGCTAGCTACAACGA TTTGTGAG | 4942 |
| 857 | ACAAAAAG A UGGGGAUA | 1920 | TATCCCCA GGCTAGCTACAACGA CTTTTTGT | 4943 |
| 863 | AGAUGGGG A UAUUCCCU | 1921 | AGGGAATA GGCTAGCTACAACGA CCCCATCT | 4944 |
| 865 | AUGGGGAG A UUCCCUUA | 1922 | TAAGGGAA GGCTAGCTACAACGA ATCCCCAT | 4945 |
| 874 | UUCCCUUA A CUUCAUGG | 1923 | CCATGAAG GGCTAGCTACAACGA TAAGGGAA | 4946 |
| 879 | UUAACUUC A UGGGAUAU | 1924 | ATATCCCA GGCTAGCTACAACGA GAAGTTAA | 4947 |
| 884 | UUCAUGGG A UAUGUAAU | 1925 | ATTACATA GGCTAGCTACAACGA CCCATGAA | 4948 |
| 886 | CAUGGGAU A UGUAAUUG | 1926 | CAATTACA GGCTAGCTACAACGA ATCCCATG | 4949 |
| 891 | GAUAUGUA A UUGGGAGU | 1927 | ACTCCCAA GGCTAGCTACAACGA TACATATC | 4950 |
| 906 | GUUGGGGC A CAUUGCCA | 1928 | TGGCAATG GGCTAGCTACAACGA GCCCCAAC | 4951 |
| 908 | UGGGGCAC A UUGCCACA | 1929 | TGTGGCAA GGCTAGCTACAACGA GTGCCCCA | 4952 |
| 914 | ACAUUGCC A CAGGAACA | 1930 | TGTTCCTG GGCTAGCTACAACGA GGCAATGT | 4953 |
| 920 | CCACAGGA A CAUAUUGU | 1931 | ACAATATG GGCTAGCTACAACGA TCCTGTGG | 4954 |
| 922 | ACAGGAAC A UAUUGUAC | 1932 | GTACAATA GGCTAGCTACAACGA GTTCCTGT | 4955 |
| 924 | AGGAACAU A UUGUACAA | 1933 | TTGTACAA GGCTAGCTACAACGA ATGTTCCT | 4956 |
| 929 | CAUAUUGU A CAAAAAAU | 1934 | ATTTTTTG GGCTAGCTACAACGA ACAATATG | 4957 |
| 936 | UACAAAAA A UCAAAAUG | 1935 | CATTTTGA GGCTAGCTACAACGA TTTTTGTA | 4958 |
| 942 | AAAUCAAA A UGUGUUUU | 1936 | AAAACACA GGCTAGCTACAACGA TTTGATTT | 4959 |
| 956 | UUUAGGAA A CUUCCUGU | 1937 | ACAGGAAG GGCTAGCTACAACGA TTCCTAAA | 4960 |
| 967 | UCCUGUAA A CAGGCCUA | 1938 | TAGGCCTG GGCTAGCTACAACGA TTACAGGA | 4961 |
| 975 | ACAGGCCU A UUGAUUGG | 1939 | CCAATCAA GGCTAGCTACAACGA AGGCCTGT | 4962 |
| 979 | GCCUAUUG A UUGGAAAG | 1940 | CTTTCCAA GGCTAGCTACAACGA CAATAGGC | 4963 |
| 989 | UGGAAAGU A UGUCAACG | 1941 | CGTTGACA GGCTAGCTACAACGA ACTTTCCA | 4964 |
| 995 | GUAUGUCA A CGAAUUGU | 1942 | ACAATTCG GGCTAGCTACAACGA TGACATAC | 4965 |
| 999 | GUCAACGA A UUGUGGGU | 1943 | ACCCACAA GGCTAGCTACAACGA TCGTTGAC | 4966 |
| 1032 | CCCCUUUC A CGCAAUGU | 1944 | ACATTGCG GGCTAGCTACAACGA GAAAGGGG | 4967 |
| 1037 | UUCACGCA A UGUGGAUA | 1945 | TATCCACA GGCTAGCTACAACGA TGCGTGAA | 4968 |
| 1043 | CAAUGUGG A UAUUCUGC | 1946 | GCAGAATA GGCTAGCTACAACGA CCACATTG | 4969 |
| 1045 | AUGUGGAU A UUCUGCUU | 1947 | AAGCAGAA GGCTAGCTACAACGA ATCCACAT | 4970 |
| 1056 | CUGCUUUA A UGCCUUUA | 1948 | TAAAGGCA GGCTAGCTACAACGA TAAAGCAG | 4971 |
| 1064 | AUGCCUUU A UAUGCAUG | 1949 | CATGCATA GGCTAGCTACAACGA AAAGGCAT | 4972 |
| 1066 | GCCUUUAU A UGCAUGCA | 1950 | TGCATGCA GGCTAGCTACAACGA ATAAAGGC | 4973 |
| 1070 | UUAUAUGC A UGCAUACA | 1951 | TGTATGCA GGCTAGCTACAACGA GCATATAA | 4974 |
| 1074 | AUGCAUGC A UACAAGCA | 1952 | TGCTTGTA GGCTAGCTACAACGA GCATGCAT | 4975 |
| 1076 | GCAUGCAU A CAAGCAAA | 1953 | TTTGCTTG GGCTAGCTACAACGA ATGCATGC | 4976 |
| 1085 | CAAGCAAA A CAGGCUUU | 1954 | AAAGCCTG GGCTAGCTACAACGA TTTGCTTG | 4977 |
| 1095 | AGGCUUUU A CUUUCUCG | 1955 | CGAGAAAG GGCTAGCTACAACGA AAAAGCCT | 4978 |
| 1107 | UCUCGCCA A CUUACAAG | 1956 | CTTGTAAG GGCTAGCTACAACGA TGGCGAGA | 4979 |
| 1111 | GCCAACUU A CAAGGCCU | 1957 | AGGCCTTG GGCTAGCTACAACGA AAGTTGGC | 4980 |
| 1130 | CUAAGUAA A CAGUAUGU | 1958 | ACATACTG GGCTAGCTACAACGA TTACTTAG | 4981 |
| 1135 | UAAACAGU A UGUGAACC | 1959 | GGTTCACA GGCTAGCTACAACGA ACTGTTTA | 4982 |
| 1141 | GUAUGUGA A CCUUUACC | 1960 | GGTAAAGG GGCTAGCTACAACGA TCACATAC | 4983 |
| 1147 | GAACCUUU A CCCCGUUG | 1961 | CAACGGGG GGCTAGCTACAACGA AAAGGTTC | 4984 |
| 1163 | GCUCGGCA A CGGCCUGG | 1962 | CCAGGCCG GGCTAGCTACAACGA TGCCGAGC | 4985 |
| 1175 | CCUGGUCU A UGCCAAGU | 1963 | ACTTGGCA GGCTAGCTACAACGA AGACCAGG | 4986 |
| 1192 | GUUUGCUG A CGCAACCC | 1964 | GGGTTGCG GGCTAGCTACAACGA CAGCAAAC | 4987 |
| 1197 | CUGACGCA A CCCCCACU | 1965 | AGTGGGGG GGCTAGCTACAACGA TGCGTCAG | 4988 |
| 1203 | CAACCCCC A CUGGUUGG | 1966 | CCAACCAG GGCTAGCTACAACGA GGCGGTTG | 4989 |
| 1221 | GCUUGGCC A UAGGCCAU | 1967 | ATGGCCTA GGCTAGCTACAACGA GGCCAAGC | 4990 |
| 1228 | CAUAGGCC A UCAGCGCA | 1968 | TGCGCTGA GGCTAGCTACAACGA GGCCTATG | 4991 |
| 1236 | AUCAGCGC A UGCGUGGA | 1969 | TCCACGCA GGCTAGCTACAACGA GCGCTGAT | 4992 |
| 1245 | UGCGUGGA A CCUUUGUG | 1970 | CACAAAGG GGCTAGCTACAACGA TCCACGCA | 4993 |
| 1266 | CUCUGCCG A UCCAUACC | 1971 | GGTATGGA GGCTAGCTACAACGA CGGCAGAG | 4994 |
| 1270 | GCCGAUCC A UACCGCCG | 1972 | CCGCGGTA GGCTAGCTACAACGA GGATCGGC | 4995 |
| 1272 | CGAUCCAU A CCGCGGAA | 1973 | TTCCGCCG GGCTAGCTACAACGA ATGGATCG | 4996 |
| 1280 | ACCGCGGA A CUCCUAGC | 1974 | GCTAGGAG GGCTAGCTACAACGA TCCGCGGT | 4997 |
| 1322 | GGGGCAAA A CUCAUCGG | 1975 | CCGATGAG GGCTAGCTACAACGA TTTGCCCC | 4998 |
| 1326 | CAAAACUC A UCGGGACU | 1976 | AGTCCCGA GGCTAGCTACAACGA GAGTTTTG | 4999 |
| 1332 | UCAUCGGG A CUGACAAU | 1977 | ATTGTCAG GGCTAGCTACAACGA CCCGATGA | 5000 |
| 1336 | CGGGACUG A CAAUUCUG | 1978 | CAGAATTG GGCTAGCTACAACGA CAGTCCCG | 5001 |
| 1339 | GACUGACA A UUCUGUCG | 1979 | CGACAGAA GGCTAGCTACAACGA TGTCAGTC | 5002 |
| 1361 | UCCCGCAA A UAUACAUC | 1980 | GATGTATA GGCTAGCTACAACGA TTGCGGGA | 5003 |
| 1363 | CCGCAAAU A UACAUCAU | 1981 | ATGATGTA GGCTAGCTACAACGA ATTTGCGG | 5004 |
| 1365 | GCAAAUAU A CAUCAUUU | 1982 | AAATGATG GGCTAGCTACAACGA ATATTTGC | 5005 |
| 1367 | AAAUAUAC A UCAUUUCC | 1983 | GGAAATGA GGCTAGCTACAACGA GTATATTT | 5006 |
| 1370 | UAUACAUC A UUUCCAUG | 1984 | CATGGAAA GGCTAGCTACAACGA GATGTATA | 5007 |
| 1376 | UCAUUUCC A UGGCUGCU | 1985 | AGCAGCCA GGCTAGCTACAACGA GGAAATGA | 5008 |
| 1399 | UGCUGCCA A CUGGAUCC | 1986 | GGATCCAG GGCTAGCTACAACGA TGGCAGCA | 5009 |
| 1404 | CCAACUGG A UCCUACGC | 1987 | GCGTAGGA GGCTAGCTACAACGA CCAGTTGG | 5010 |
| 1409 | UGGAUCCU A CGCGGGAC | 1988 | GTCCCGCG GGCTAGCTACAACGA AGGATCCA | 5011 |
| 1416 | UACGCGCG A CGUCCUUU | 1989 | AAAGGACG GGCTAGCTACAACGA CCCGCGTA | 5012 |
| 1429 | CUUUGUUU A CGUCCCGU | 1990 | ACGGGACG GGCTAGCTACAACGA AAACAAAG | 5013 |
| 1447 | GGCGCUGA A UCCCGCGG | 1991 | CCGCGGGA GGCTAGCTACAACGA TCAGCGCC | 5014 |
| 1456 | UCCCGCGG A CGACCCCU | 1992 | AGGGGTCG GGCTAGCTACAACGA CCGCCGGA | 5015 |
| 1459 | CGCGGACG A CCCCUCCC | 1993 | GGGAGGGG GGCTAGCTACAACGA CGTCCGCG | 5016 |
| 1486 | GGGGCUCU A CCGCCCGC | 1994 | GCGGGCGG GGCTAGCTACAACGA AGAGCCCC | 5017 |
| 1505 | CUCCGCCU A UUGUACCG | 1995 | CGGTACAA GGCTAGCTACAACGA AGGCGGAG | 5018 |
| 1510 | CCUAUUGU A CCGACCGU | 1996 | ACGGTCGG GGCTAGCTACAACGA ACAATAGG | 5019 |
| 1514 | UUGUACCG A CCGUCCAC | 1997 | GTGGACGG GGCTAGCTACAACGA CGGTACAA | 5020 |
| 1521 | GACCGUCC A CGGGGCGC | 1998 | GCGCCCCG GGCTAGCTACAACGA GGACGGTC | 5021 |
| 1530 | CGGGGCGC A CCUCUCUU | 1999 | AAGAGAGG GGCTAGCTACAACGA GCGCCCCG | 5022 |
| 1540 | CUCUCUUU A CGCGGACU | 2000 | AGTCCGCG GGCTAGCTACAACGA AAAGAGAG | 5023 |
| 1546 | UUACGCGG A CUCCCCGU | 2001 | ACGGGGAG GGCTAGCTACAACGA CCGCGTAA | 5024 |
| 1567 | GCCUUCUC A UCUGCCGG | 2002 | CCGGCAGA GGCTAGCTACAACGA GAGAAGGC | 5025 |
| 1576 | UCUGCCGG A CCGUGUGC | 2003 | GCACACGG GGCTAGCTACAACGA CCGGCAGA | 5026 |
| 1585 | CCGUGUGC A CUUCGCUU | 2004 | AAGCGAAG GGCTAGCTACAACGA GCACACGG | 5027 |
| 1595 | UUCGCUUC A CCUCUGCA | 2005 | TGCAGAGG GGCTAGCTACAACGA GAAGCGAA | 5028 |
| 1603 | ACCUCUGC A CGUCGCAU | 2006 | ATGCGACG GGCTAGCTACAACGA GCAGAGGT | 5029 |
| 1610 | CACGUCGC A UGGAGACC | 2007 | GGTCTCCA GGCTAGCTACAACGA GCGACGTG | 5030 |
| 1616 | GCAUGGAG A CCACCGUG | 2008 | CACGGTGG GGCTAGCTACAACGA CTCCATGC | 5031 |
| 1619 | UGGAGACC A CCGUGAAC | 2009 | GTTCACGG GGCTAGCTACAACGA GGTCTCCA | 5032 |
| 1626 | CACCGUGA A CGCCCACA | 2010 | TGTGGGCG GGCTAGCTACAACGA TCACGGTG | 5033 |
| 1638 | CCACAGGA A CCUGCCCA | 2011 | TGGGCAGG GGCTAGCTACAACGA TCCTGTGG | 5034 |
| 1656 | GGUCUUGC A UAAGAGGA | 2012 | TCCTCTTA GGCTAGCTACAACGA GCAAGACC | 5035 |
| 1664 | AUAAGAGG A CUCUUGGA | 2013 | TCCAAGAG GGCTAGCTACAACGA CCTCTTAT | 5036 |
| 1672 | ACUCUUGG A CUUUCAGC | 2014 | GCTGAAAG GGCTAGCTACAACGA CCAAGAGT | 5037 |
| 1682 | UUUCAGCA A UGUCAACG | 2015 | CGTTGACA GGCTAGCTACAACGA TGCTGAAA | 5038 |
| 1688 | CAAUGUCA A CGACCGAC | 2016 | GTCGGTCG GGCTAGCTACAACGA TGACATTG | 5039 |
| 1691 | UGUCAACG A CCGACCUU | 2017 | AAGGTCGG GGCTAGCTACAACGA CGTTGACA | 5040 |
| 1695 | AACGACCG A CCUUGAGG | 2018 | CCTCAAGG GGCTAGCTACAACGA CGGTCGTT | 5041 |
| 1705 | CUUGAGGC A UACUUCAA | 2019 | TTGAAGTA GGCTAGCTACAACGA GCCTCAAG | 5042 |
| 1707 | UGAGGCAU A CUUCAAAG | 2020 | CTTTGAAG GGCTAGCTACAACGA ATGCCTCA | 5043 |
| 1716 | CUUCAAAG A CUGUGUGU | 2021 | ACACACAG GGCTAGCTACAACGA CTTTGAAG | 5044 |
| 1728 | UGUGUUUA A UGAGUGGG | 2022 | CCCACTCA GGCTAGCTACAACGA TAAACACA | 5045 |
| 1774 | GUCUUUGU A CUAGGAGG | 2023 | CCTCCTAG GGCTAGCTACAACGA ACAAAGAC | 5046 |
| 1791 | CUGUAGGC A UAAAUUGG | 2024 | CCAATTTA GGCTAGCTACAACGA GCCTACAG | 5047 |
| 1795 | AGGCAUAA A UUGGUGUG | 2025 | CACACCAA GGCTAGCTACAACGA TTATGCCT | 5048 |
| 1807 | GUGUGUUC A CCAGCACC | 2026 | GGTGCTGG GGCTAGCTACAACGA GAACACAC | 5049 |
| 1813 | UCACCAGC A CCAUGCAA | 2027 | TTGCATGG GGCTAGCTACAACGA GCTGGTGA | 5050 |
| 1816 | CCAGCACC A UGCAACUU | 2028 | AAGTTGCA GGCTAGCTACAACGA GGTGCTGG | 5051 |
| 1821 | ACCAUGCA A CUUUUUCA | 2029 | TGAAAAAG GGCTAGCTACAACGA TGCATGGT | 5052 |
| 1829 | ACUUUUUC A CCUCUGCC | 2030 | GGCAGAGG GGCTAGCTACAACGA GAAAAAGT | 5053 |
| 1840 | UCUGCCUA A UCAUCUCA | 2031 | TGAGATGA GGCTAGCTACAACGA TAGGCAGA | 5054 |
| 1843 | GCCUAAUC A UCUCAUGU | 2032 | ACATGAGA GGCTAGCTACAACGA GATTAGGC | 5055 |
| 1848 | AUCAUCUC A UGUUCAUG | 2033 | CATGAACA GGCTAGCTACAACGA GAGATGAT | 5056 |
| 1854 | UCAUGUUC A UGUCCUAC | 2034 | GTAGGACA GGCTAGCTACAACGA GAACATGA | 5057 |
| 1861 | CAUGUCCU A CUGUUCAA | 2035 | TTGAACAG GGCTAGCTACAACGA AGGACATG | 5058 |
| 1903 | UUUGGGGC A UGGACAUU | 2036 | AATGTCCA GGCTAGCTACAACGA GCCCCAAA | 5059 |
| 1907 | GGGCAUGG A CAUUGACC | 2037 | GGTCAATG GGCTAGCTACAACGA CCATGCCC | 5060 |
| 1909 | GCAUGGAC A UUGACCCG | 2038 | CGGGTCAA GGCTAGCTACAACGA GTCCATGC | 5061 |
| 1913 | GGACAUUG A CCCGUAUA | 2039 | TATACGGG GGCTAGCTACAACGA CAATGTCC | 5062 |
| 1919 | UGACCCCU A UAAAGAAU | 2040 | ATTCTTTA GGCTAGCTACAACGA ACGGGTCA | 5063 |
| 1926 | UAUAAAGA A UUUGGAGC | 2041 | GCTCCAAA GGCTAGCTACAACGA TCTTTATA | 5064 |
| 1947 | GUGGAGUU A CUCUCUUU | 2042 | AAAGAGAG GGCTAGCTACAACGA AACTCCAC | 5065 |
| 1967 | GCCUUCUG A CUUCUUUC | 2043 | GAAAGAAG GGCTAGCTACAACGA CAGAAGGC | 5066 |
| 1981 | UUCCUUCU A UUCGAGAU | 2044 | ATCTCGAA GGCTAGCTACAACGA AGAAGGAA | 5067 |
| 1988 | UAUUCGAG A UCUCCUCG | 2045 | CCAGGAGA GGCTAGCTACAACGA CTCGAATA | 5068 |
| 1997 | UCUCCUCG A CACCGCCU | 2046 | AGGCGGTG GGCTAGCTACAACGA CGAGGAGA | 5069 |
| 1999 | UCCUCGAC A CCGCCUCU | 2047 | AGAGGCGG GGCTAGCTACAACGA GTCGAGGA | 5070 |
| 2015 | UGCUCUGU A UCGGGGGG | 2048 | CCCCCCGA GGCTAGCTACAACGA ACAGAGCA | 5071 |
| 2040 | UCUCCGGA A CAUUGUUC | 2049 | GAACAATG GGCTAGCTACAACGA TCCGGAGA | 5072 |
| 2042 | UCCGGAAC A UUGUUCAC | 2050 | GTGAACAA GGCTAGCTACAACGA GTTCCGGA | 5073 |
| 2049 | CAUUGUUC A CCUCACCA | 2051 | TGGTGAGG GGCTAGCTACAACGA GAACAATG | 5074 |
| 2054 | UUCACCUC A CCAUACGG | 2052 | CCGTATGG GGCTAGCTACAACGA CAGGTGAA | 5075 |
| 2057 | ACCUCACC A UACGGCAC | 2053 | GTGCCGTA GGCTAGCTACAACGA GGTGAGGT | 5076 |
| 2059 | CUCACCAU A CGGCACUC | 2054 | GAGTGCCG GGCTAGCTACAACGA ATGGTGAG | 5077 |
| 2064 | CAUACGGC A CUCAGGCA | 2055 | TCCCTGAG GGCTAGCTACAACGA GCCGTATG | 5078 |
| 2077 | GGCAAGCU A UUCUGUGU | 2056 | ACACAGAA GGCTAGCTACAACGA AGCTTGCC | 5079 |
| 2098 | GUGAGUUG A UGAAUCUA | 2057 | TAGATTCA GGCTAGCTACAACGA CAACTCAC | 5080 |
| 2102 | GUUGAUGA A UCUAGCCA | 2058 | TGGCTAGA GGCTAGCTACAACGA TCATCAAC | 5081 |
| 2110 | AUCUAGCC A CCUGGGUG | 2059 | CACCCAGG GGCTAGCTACAACGA GGCTAGAT | 5082 |
| 2126 | GGGAAGUA A UUUGGAAG | 2060 | CTTCCAAA GGCTAGCTACAACGA TACTTCCC | 5083 |
| 2135 | UUUGGAAG A UCCAGCAU | 2061 | ATGCTGGA GGCTAGCTACAACGA CTTCCAAA | 5084 |
| 2142 | GAUCCAGC A UCCAGGGA | 2062 | TCCCTGGA GGCTAGCTACAACGA GCTGGATC | 5085 |
| 2151 | UCCAGGGA A UUAGUAGU | 2063 | ACTACTAA GGCTAGCTACAACGA TCCCTGGA | 5086 |
| 2165 | AGUCAGCU A UGUCAACG | 2064 | CGTTGACA GGCTAGCTACAACGA AGCTGACT | 5087 |
| 2171 | CUAUGUCA A CGUUAAUA | 2065 | TATTAACG GGCTAGCTACAACGA TGACATAG | 5088 |
| 2177 | CAACGUUA A UAUGGGCC | 2066 | GGCCCATA GGCTAGCTACAACGA TAACGTTG | 5089 |
| 2179 | ACGUUAAU A UGGGCCUA | 2067 | TAGGCCCA GGCTAGCTACAACGA ATTAACGT | 5090 |
| 2191 | GCCUAAAA A UCAGACAA | 2068 | TTGTCTGA GGCTAGCTACAACGA TTTTAGGC | 5091 |
| 2196 | AAAAUCAG A CAACUAUU | 2069 | AATAGTTG GGCTAGCTACAACGA CTGATTTT | 5092 |
| 2199 | AUCAGACA A CUAUUGUG | 2070 | CACAATAG GGCTAGCTACAACGA TGTCTGAT | 5093 |
| 2202 | AGACAACU A UUGUGGUU | 2071 | AACCACAA GGCTAGCTACAACGA AGTTGTCT | 5094 |
| 2213 | GUGGUUUC A CAUUUCCU | 2072 | AGGAAATG GGCTAGCTACAACGA GAAACCAC | 5095 |
| 2215 | GGUUUCAC A UUUCCUGU | 2073 | ACAGGAAA GGCTAGCTACAACGA GTGAAACC | 5096 |
| 2227 | CCUGUCUU A CUUUUGGG | 2074 | CCCAAAAG GGCTAGCTACAACGA AAGACAGG | 5097 |
| 2242 | GGCGAGAA A CUGUUCUU | 2075 | AAGAACAG GGCTAGCTACAACGA TTCTCGCC | 5098 |
| 2253 | GUUCUUGA A UAUUUGGU | 2076 | ACCAAATA GGCTAGCTACAACGA TCAAGAAC | 5099 |
| 2255 | UCUUGAAU A UUUGGUGU | 2077 | ACACCAAA GGCTAGCTACAACGA ATTCAAGA | 5100 |
| 2278 | GAGUGUGG A UUCGCACU | 2078 | AGTGCGAA GGCTAGCTACAACGA CCACACTC | 5101 |
| 2284 | GGAUUCGC A CUCCUCCU | 2079 | AGGAGGAG GGCTAGCTACAACGA GCGAATCC | 5102 |
| 2295 | CCUCCUGC A UAUAGACC | 2080 | GGTCTATA GGCTAGCTACAACGA GCAGGAGG | 5103 |
| 2297 | UCCUGCAU A UAGACCAC | 2081 | GTGGTCTA GGCTAGCTACAACGA ATGCAGGA | 5104 |
| 2301 | GCAUAUAG A CCACCAAA | 2082 | TTTGGTGG GGCTAGCTACAACGA CTATATGC | 5105 |
| 2304 | UAUAGACC A CCAAAUGC | 2083 | GCATTTGG GGCTAGCTACAACGA GGTCTATA | 5106 |
| 2309 | ACCACCAA A UGCCCCUA | 2084 | TAGGGGCA GGCTAGCTACAACGA TTGGTGGT | 5107 |
| 2317 | AUGCCCCU A UCUUAUCA | 2085 | TGATAAGA GGCTAGCTACAACGA AGGGGCAT | 5108 |
| 2322 | CCUAUCUU A UCAACACU | 2086 | AGTGTTGA GGCTAGCTACAACGA AAGATAGG | 5109 |
| 2326 | UCUUAUCA A CACUUCCG | 2087 | CGGAAGTG GGCTAGCTACAACGA TGATAAGA | 5110 |
| 2328 | UUAUCAAC A CUUCCGGA | 2088 | TCCGGAAG GGCTAGCTACAACGA GTTGATAA | 5111 |
| 2338 | UUCCGGAA A CUACUGUU | 2089 | AACAGTAG GGCTAGCTACAACGA TTCCGGAA | 5112 |
| 2341 | CGGAAACU A CUGUUGUU | 2090 | AACAACAG GGCTAGCTACAACGA AGTTTCCG | 5113 |
| 2352 | GUUGUUAG A CGAAGAGG | 2091 | CCTCTTCG GGCTAGCTACAACGA CTAACAAC | 5114 |
| 2380 | GAAGAAGA A CUCCCUCG | 2092 | CCAGGGAG GGCTAGCTACAACGA TCTTCTTC | 5115 |
| 2397 | CCUCCCAG A CGAAGGUC | 2093 | GACCTTCG GGCTAGCTACAACGA CTGCGAGG | 5116 |
| 2409 | AGGUCUCA A UCGCCGCG | 2094 | CGCGGCGA GGCTAGCTACAACGA TGAGACCT | 5117 |
| 2427 | CGCAGAAG A UCUCAAUC | 2095 | GATTGAGA GGCTAGCTACAACGA CTTCTGCG | 5118 |
| 2433 | AGAUCUCA A UCUCGGGA | 2096 | TCCCGAGA GGCTAGCTACAACGA TGAGATCT | 5119 |
| 2442 | UCUCGGGA A UCUCAAUG | 2097 | CATTGAGA GGCTAGCTACAACGA TCCCGAGA | 5120 |
| 2448 | GAAUCUCA A UGUUAGUA | 2098 | TACTAACA GGCTAGCTACAACGA TGAGATTC | 5121 |
| 2456 | AUGUUAGU A UUCCUUGG | 2099 | CCAAGGAA GGCTAGCTACAACGA ACTAACAT | 5122 |
| 2465 | UUCCUUGG A CACAUAAG | 2100 | CTTATGTG GGCTAGCTACAACGA CCAAGGAA | 5123 |
| 2467 | CCUUGGAC A CAUAAGGU | 2101 | ACCTTATG GGCTAGCTACAACGA GTCCAAGG | 5124 |
| 2469 | UUGGACAC A UAAGGUGG | 2102 | CCACCTTA GGCTAGCTACAACGA GTGTCCAA | 5125 |
| 2481 | GGUGGGAA A CUUUACGG | 2103 | CCGTAAAG GGCTAGCTACAACGA TTCCCACC | 5126 |
| 2486 | GAAACUUU A CGGGGCUU | 2104 | AAGCCCCG GGCTAGCTACAACGA AAAGTTTC | 5127 |
| 2496 | GGGGCUUU A UUCUUCUA | 2105 | TAGAAGAA GGCTAGCTACAACGA AAAGCCCC | 5128 |
| 2504 | AUUCUUCU A CGGUACCU | 2106 | AGGTACCG GGCTAGCTACAACGA AGAAGAAT | 5129 |
| 2509 | UCUACGGU A CCUUGCUU | 2107 | AAGCAAGG GGCTAGCTACAACGA ACCGTAGA | 5130 |
| 2520 | UUGCUUUA A UCCUAAAU | 2108 | ATTTAGGA GGCTAGCTACAACGA TAAAGCAA | 5131 |
| 2527 | AAUCCUAA A UGGCAAAC | 2109 | GTTTGCCA GGCTAGCTACAACGA TTAGGATT | 5132 |
| 2534 | AAUGGCAA A CUCCUUCU | 2110 | AGAAGGAG GGCTAGCTACAACGA TTGCCATT | 5133 |
| 2550 | UUUUCCUG A CAUUCAUU | 2111 | AATGAATG GGCTAGCTACAACGA CAGGAAAA | 5134 |
| 2552 | UUCCUGAC A UUCAUUUG | 2112 | CAAATGAA GGCTAGCTACAACGA GTCAGGAA | 5135 |
| 2556 | UGACAUUC A UUUGCAGG | 2113 | CCTGCAAA GGCTAGCTACAACGA GAATGTCA | 5136 |
| 2568 | GCAGGAGG A CAUUGUUG | 2114 | CAACAATG GGCTAGCTACAACGA CCTCCTGC | 5137 |
| 2570 | AGGAGGAC A UUGUUGAU | 2115 | ATCAACAA GGCTAGCTACAACGA GTCCTCCT | 5138 |
| 2577 | CAUUGUUG A UAGAUGUA | 2116 | TACATCTA GGCTAGCTACAACGA CAACAATG | 5139 |
| 2581 | GUUGAUAG A UGUAAGCA | 2117 | TGCTTACA GGCTAGCTACAACGA CTATCAAC | 5140 |
| 2590 | UGUAAGCA A UUUGUGGG | 2118 | CCCACAAA GGCTAGCTACAACGA TGCTTACA | 5141 |
| 2606 | GGCCCCUU A CAGUAAAU | 2119 | ATTTACTG GGCTAGCTACAACGA AAGGGGCC | 5142 |
| 2613 | UACAGUAA A UGAAAACA | 2120 | TGTTTTCA GGCTAGCTACAACGA TTACTGTA | 5143 |
| 2619 | AAAUGAAA A CAGGAGAC | 2121 | GTCTCCTG GGCTAGCTACAACGA TTTCATTT | 5144 |
| 2626 | AACAGGAG A CUUAAAUU | 2122 | AATTTAAG GGCTAGCTACAACGA CTCCTGTT | 5145 |
| 2632 | AGACUUAA A UUAACUAU | 2123 | ATAGTTAA GGCTAGCTACAACGA TTAAGTCT | 5146 |
| 2636 | UUAAAUUA A CUAUGCCU | 2124 | AGGCATAG GGCTAGCTACAACGA TAATTTAA | 5147 |
| 2639 | AAUUAACU A UGCCUGCU | 2125 | AGCAGGCA GGCTAGCTACAACGA AGTTAATT | 5148 |
| 2655 | UAGGUUUU A UCCCAAUG | 2126 | CATTGGGA GGCTAGCTACAACGA AAAACCTA | 5149 |
| 2661 | UUAUCCCA A UGUUACUA | 2127 | TAGTAACA GGCTAGCTACAACGA TGGGATAA | 5150 |
| 2666 | CCAAUGUU A CUAAAUAU | 2128 | ATATTTAG GGCTAGCTACAACGA AACATTGG | 5151 |
| 2671 | GUUACUAA A UAUUUGCC | 2129 | GGCAAATA GGCTAGCTACAACGA TTAGTAAC | 5152 |
| 2673 | UACUAAAU A UUUGCCCU | 2130 | AGGGCAAA GGCTAGCTACAACGA ATTTAGTA | 5153 |
| 2685 | GCCCUUAG A UAAAGGGA | 2131 | CGGTTTGA GGCTAGCTACAACGA CTAAGGGC | 5154 |
| 2693 | AUAAAGGG A UCAAACCG | 2132 | CGGTTTGA GGCTAGCTACAACGA CCCTTTAT | 5155 |
| 2698 | GGGAUCAA A CCGUAUUA | 2133 | TAATACGG GGCTAGCTACAACGA TTGATCCC | 5156 |
| 2703 | CAAACCGU A UUAUCCAG | 2134 | CTGGATAA GGCTAGCTACAACGA ACGGTTTG | 5157 |
| 2706 | ACCGUAUU A UCCAGAGU | 2135 | ACTCTGGA GGCTAGCTACAACGA AATACGGT | 5158 |
| 2715 | UCCAGAGU A UGUAGUUA | 2136 | TAACTACA GGCTAGCTACAACGA ACTCTGGA | 5159 |
| 2724 | UGUAGUUA A UCAUUACU | 2137 | AGTAATGA GGCTAGCTACAACGA TAACTACA | 5160 |
| 2727 | AGUUAAUC A UUACUUCC | 2138 | GGAAGTAA GGCTAGCTACAACGA GATTAACT | 5161 |
| 2730 | UAAUCAUU A CUUCCAGA | 2139 | TCTGGAAG GGCTAGCTACAACGA AATGATTA | 5162 |
| 2738 | ACUUCCAG A CGCGACAU | 2140 | ATGTCGCG GGCTAGCTACAACGA CTGGAAGT | 5163 |
| 2743 | CAGACGCG A CAUUAUUU | 2141 | AAATAATG GGCTAGCTACAACGA CGCGTCTG | 5164 |
| 2745 | CACGCGAC A UUAUUUAC | 2142 | GTAAATAA GGCTAGCTACAACGA GTCGCGTC | 5165 |
| 2748 | GCGACAUU A UUUACACA | 2143 | TGTGTAAA GGCTAGCTACAACGA AATGTCGC | 5166 |
| 2752 | CAUUAUUU A CACACUCU | 2144 | AGAGTGTG GGCTAGCTACAACGA AAATAATG | 5167 |
| 2754 | UUAUUUAC A CACUCUUU | 2145 | AAAGAGTG GGCTAGCTACAACGA GTAAATAA | 5168 |
| 2756 | AUUUACAC A CUCUUUGG | 2146 | CCAAAGAG GGCTAGCTACAACGA GTGTAAAT | 5169 |
| 2774 | AGGCGGGG A UCUUAUAU | 2147 | ATATAAGA GGCTAGCTACAACGA CCCCGCCT | 5170 |
| 2779 | GGGAUCUU A UAUAAAAG | 2148 | CTTTTATA GGCTAGCTACAACGA AAGATCCC | 5171 |
| 2781 | GAUCUUAU A UAAAAGAG | 2149 | CTCTTTTA GGCTAGCTACAACGA ATAAGATC | 5172 |
| 2795 | CAGAGUCC A CACGUAGC | 2150 | GCTACGTG GGCTAGCTACAACGA GGACTCTC | 5173 |
| 2797 | CAGUCCAC A CGUAGCGC | 2151 | GCGCTACG GGCTAGCTACAACGA GTGGACTC | 5174 |
| 2809 | AGCGCCUC A UUUUGCGG | 2152 | CCGCAAAA GGCTAGCTACAACGA GAGGCGCT | 5175 |
| 2821 | UGCGGGUC A CCAUAUUC | 2153 | GAATATGG GGCTAGCTACAACGA GACCCGCA | 5176 |
| 2824 | GGGUCACC A UAUUCUUG | 2154 | CAAGAATA GGCTAGCTACAACGA GGTGACCC | 5177 |
| 2826 | GUCACCAU A UUCUUGGG | 2155 | CCCAAGAA GGCTAGCTACAACGA ATGGTGAC | 5178 |
| 2836 | UCUUGGGA A CAAGAUCU | 2156 | AGATCTTG GGCTAGCTACAACGA TCCCAAGA | 5179 |
| 2841 | GGAACAAG A UCUACAGC | 2157 | GCTGTAGA GGCTAGCTACAACGA CTTGTTCC | 5180 |
| 2845 | CAAGAUCU A CAGCAUGG | 2158 | CCATGCTG GGCTAGCTACAACGA AGATCTTG | 5181 |
| 2850 | UCUACAGC A UGGGAGGU | 2159 | ACCTCCCA GGCTAGCTACAACGA GCTGTAGA | 5182 |
| 2870 | UCUUCCAA A CCUCGAAA | 2160 | TTTCGAGG GGCTAGCTACAACGA TTGGAAGA | 5183 |
| 2883 | GAAAAGGC A UGUGGACA | 2161 | TGTCCCCA GGCTAGCTACAACGA GCCTTTTC | 5184 |
| 2889 | GCAUGGGG A CAAAUCUU | 2162 | AAGATTTG GGCTAGCTACAACGA CCCCATGC | 5185 |
| 2893 | GGGGACAA A UCUUUCUG | 2163 | CAGAAAGA GGCTAGCTACAACGA TTGTCCCC | 5186 |
| 2908 | UGUCCCCA A UCCCCUGG | 2164 | CCAGGGGA GGCTAGCTACAACGA TGGGGACA | 5187 |
| 2918 | CCCCUGGG A UUCUUCCC | 2165 | GGGAAGAA GGCTAGCTACAACGA CCCAGGGG | 5188 |
| 2929 | CUUCCCCG A UCAUCAGU | 2166 | ACTGATGA GGCTAGCTACAACGA CGGGGAAG | 5189 |
| 2932 | CCCCGAUC A UCAGUUGG | 2167 | CCAACTGA GGCTAGCTACAACGA GATCGGGG | 5190 |
| 2941 | UCAGUUGG A CCCUGCAU | 2168 | ATGCAGGG GGCTAGCTACAACGA CCAACTGA | 5191 |
| 2948 | GACCCUGC A UUCAAAGC | 2169 | GCTTTGAA GGCTAGCTACAACGA GCAGGGTC | 5192 |
| 2959 | CAAAGCCA A CUCAGUAA | 2170 | TTACTGAG GGCTAGCTACAACGA TGGCTTTG | 5193 |
| 2968 | CUCAGUAA A UCCAGAUU | 2171 | AATCTGGA GGCTAGCTACAACGA TTACTGAG | 5194 |
| 2974 | AAAUCCAG A UUGGGACC | 2172 | GGTCCCAA GGCTAGCTACAACGA CTGGATTT | 5195 |
| 2980 | AGAUUGGG A CCUCAACC | 2173 | GGTTGAGG GGCTAGCTACAACGA CCCAATCT | 5196 |
| 2986 | GGACCUCA A CCCGCACA | 2174 | TGTGCGGG GGCTAGCTACAACGA TGAGGTCC | 5197 |
| 2998 | GCACAAGG A CAACUGGC | 2175 | GCCAGTTG GGCTAGCTACAACGA CCTTGTGC | 5198 |
| 3001 | CAAGGACA A CUGGCCGG | 2176 | CCGGCCAG GGCTAGCTACAACGA TGTCCTTG | 5199 |
| 3010 | CUGGCCGG A CGCCAACA | 2177 | TGTTGGCG GGCTAGCTACAACGA CCGGCCAG | 5200 |
| 3016 | GGACGCCA A CAAGGUGG | 2178 | CCACCTTG GGCTAGCTACAACGA TGGCGTCC | 5201 |
| 3035 | GUGGGAGC A UUCCGGCC | 2179 | GGCCCGAA GGCTAGCTACAACGA GCTCCCAC | 5202 |
| 3051 | CAUGGUUC A CCCCUCCC | 2180 | GGGAGGGG GGCTAGCTACAACGA GAACCCTG | 5203 |
| 3061 | CCCUCCCC A UGGGGGAC | 2181 | GTCCCCCA GGCTAGCTACAACGA GGGGAGGG | 5204 |
| 3068 | CAUGGGGG A CUGUUGGG | 2182 | CCCAACAG GGCTAGCTACAACGA CCCCCATG | 5205 |
| 3088 | GAGCCCUC A CGCUCAGG | 2183 | CCTGAGCG GGCTAGCTACAACGA GAGGGCTC | 5206 |
| 3101 | CAGGGCCU A CUCACAAC | 2184 | GTTGTGAG GGCTAGCTACAACGA AGGCCCTG | 5207 |
| 3105 | GCCUACUC A CAACUGUG | 2185 | CACAGTTG GGCTAGCTACAACGA GAGTAGGC | 5208 |
| 3108 | UACUCACA A CUGUGCCA | 2186 | TGGCACAG GGCTAGCTACAACGA TGTGAGTA | 5209 |
| 3138 | CUGCCUCC A CCAAUCGG | 2187 | CCGATTGG GGCTAGCTACAACGA GGAGGCAG | 5210 |
| 3142 | CUCCACCA A UCGGCAGU | 2188 | ACTGCCGA GGCTAGCTACAACGA TGGTGGAG | 5211 |
| 3165 | GGCAGCCU A CUCCCUUA | 2189 | TAAGGGAG GGCTAGCTACAACGA AGGCTGCC | 5212 |
| 3173 | ACUCCCUU A UCUCCACC | 2190 | GGTGGAGA GGCTAGCTACAACGA AAGGGAGT | 5213 |
| 3179 | UUAUCUCC A CCUCUAAG | 2191 | CTTAGAGG GGCTAGCTACAACGA GGAGATAA | 5214 |
| 3190 | UCUAAGGG A CACUCAUC | 2192 | GATGAGTG GGCTAGCTACAACGA CCCTTAGA | 5215 |
| 3192 | UAAGGGAC A CUCAUCCU | 2193 | AGGATGAG GGCTAGCTACAACGA GTCCCTTA | 5216 |
| 3196 | GGACACUC A UCCUCAGG | 2194 | CCTGAGGA GGCTAGCTACAACGA GAGTGTCC | 5217 |
| 3207 | CUCAGGCC A UGCAGUGG | 2195 | CCACTGCA GGCTAGCTACAACGA GGCCTGAG | 5218 |

Input Sequence = AF100308.
Cut Site = YG/M or UG/U.
Stem Length = 8.
Core Sequence = GGCTAGCTACAACGA
AF100308 (Hepatitis B virus strain 2-18, 3215 bp)

[0253] TABLE X

HUMAN HBV AMBERZYME AND SUBSTRATE SEQUENCE

| | | | | |
|---|---|---|---|---|
| Pos | Substrate | Seq ID | Amberzyme | Seq ID |

| 61 | ACUUUCCU G CUGGUGGC | 1448 | GCCACCAG GGAGGAAACUCC CU UCAAGGACAUCGUCCGGG AGGAAAGU | 5219 |
|---|---|---|---|---|
| 87 | GGAACAGU G AGCCCUGC | 1449 | GCAGGGCU GGAGGAAACUCC CU UCAAGGACAUCGUCCGGG ACUGUUCC | 5220 |
| 94 | UGAGCCCU G CUCAGAAU | 1450 | AUUCUGAG GGAGGAAACUCC CU UCAAGGACAUCCUCCGGG AGGGCUCA | 5221 |
| 112 | CUGUCUCU G CCAUAUCG | 1451 | CGAUAUGG GGAGGAAACUCC CU UCAAGGACAUCGUCCCGG AGAGACAG | 5222 |
| 132 | AUCUUAUC G AACACUCG | 1452 | CCACUCUU GCACGAAACUCC CU UCAACGACAUCGUCCGGC GAUAAGAU | 5223 |
| 153 | CCUGUACC G AACAUGCA | 1453 | UCCAUGUU GCAGGAAACUCC CU UCAAGGACAUCGUCCGGG GCUACAGG | 5224 |
| 159 | ACAACAUC G CAUCAGGA | 1454 | UCCUGAUG GGACGAAACUCC CU UCAAGCACAUCGUCCGGG GAUGUUCU | 5225 |
| 192 | GGACCCCU G CUCCUCUU | 1455 | AACACCAG GCAGCAAACUCC CU UCAAGGACAUCCUCCCCG AGCCGUCC | 5226 |
| 222 | UUCUUCUU G ACAAAAAU | 1456 | AUUUUUGU GCACGAAACUCC CU UCAACCACAUCCUCCCCG AACAAGAA | 5227 |
| 315 | CAAAAUUC G CAGUCCCA | 1457 | UGCGACUC GGAGCAAACUCC CU UCAACGACAUCGUCCGGC CAAUUUUC | 5228 |
| 374 | UCCUUAUC G CUGGAUGU | 1458 | ACAUCCAG GGAGGAAACUCC CU UCAAGGACAUCCUCCCCG CAUAACCA | 5229 |
| 387 | AUGUGUCU G CGCCCTUU | 1459 | AAACCCCG GGAGGAAACUCC CU UCAAGGACAUCGUCCCGC AGACACAU | 5230 |
| 410 | CUUCCUCU G CAUCCUCC | 1460 | GCAGGAUG GGAGGAAACUCC CU UCAACGACAUCGUCCCCG AGACGAAG | 5231 |
| 417 | UGCAUCCU G CUGCUAUG | 1461 | CAUACCAC GCACCAAACUCC CU UCAAGGACAUCGUCCGGC AGGAUGCA | 5232 |
| 420 | AUCCUGCU G CUAUCCCU | 1462 | ACCCAUAC GGACCAAACUCC CU UCAAGCACAUCGUCCGCC AGCAGGAU | 5233 |
| 425 | GCUGCUAU G CCUCAUCU | 1463 | AGAUCAGC GGAGCAAACUCC CU UCAACGACAUCGUCCGGC AUAGCAGC | 5234 |
| 468 | GGUAUGUU G CCCGUUUG | 1464 | CAAACCCG GGACGAAACUCC CU UCAAGGACAUCGUCCGCG AACAUACC | 5235 |
| 518 | CGGACCAU G CAAAACCU | 1465 | AGCUUUUC CGAGGAAACUCC CU UCAAGCACAUCGUCCGGC AUGCUCCC | 5236 |
| 527 | CAAAACCU G CACAACUC | 1466 | CACUUGUC GCAGCAAACUCC CU UCAACGACAUCGUCCCCC AGGUUUUC | 5237 |
| 538 | CAACUCCU G CUCAAGGA | 1467 | UCCUUCAG GGACGAAACUCC CU UCAAGGACAUCGUCCGCC ACGACUUG | 5238 |
| 569 | CUCAUGUU G CUCUACAA | 1468 | UUGUACAC GGACGAAACUCC CU UCAACGACAUCCUCCCGG AACAUCAC | 5239 |
| 596 | CCCAAACU G CACCUGUA | 1469 | UACACCUC GGAGGAAACUCC CU UCAACGACAUCGUCCGCC AGUUUCCG | 5240 |
| 631 | GGCCUUUC G CAAAAUAC | 1470 | CUAUUUUG GGAGGAAACUCC CU UCAAGCACAUCGUCCGCG GAAACCCC | 5241 |
| 687 | UUACUAGU G CCAUUUCU | 1471 | ACAAAUCC CGACCAAACUCC CU UCAAGCACAUCCUCCCCG ACUACUAA | 5242 |
| 747 | AUAUGCAU G AUCUCGUU | 1472 | AACCACAU CGAGCAAACUCC CU UCAACCACAUCCUCCCCC AUCCAUAU | 5243 |
| 783 | AACAUCUU G ACUCCCUU | 1473 | AACCCACU CCAGCAAACUCC CU UCAACCACAUCCUCCCCC AACAUCUU | 5244 |
| 795 | CCCUUUAU G CCCCUCUU | 1474 | AACACCCC GCACCAAACUCC CU UCAACCACAUCCUCCCCC AUAAACCC | 5245 |
| 798 | UUUAUGCC G CUCUUACC | 1475 | GCUAACAC GCACGAAACUCC CU UCAACGACAUCCUCCCCC CCCAUAAA | 5246 |
| 911 | GCCACAUU G CCACACCA | 1476 | UCCUGUGC CCACGAAACUCC CU UCAACCACAUCCUCCCGC AAUCUCCC | 5247 |
| 978 | GCCCUAUU G AUUCCAAA | 1477 | UUUCCAAU CCACCAAACUCC CU UCAACCACAUCGUCCCCC AAUACGCC | 5248 |
| 997 | AUCUCAAC G AAUUCUCC | 1478 | CCACAAUU CCACCAAACUCC CU UCAAGCACAUCCUCCCCC CUUCACAU | 5249 |
| 1020 | UCCCCUUU G CCCCCCCU | 1479 | ACCCCCCC CCACCAAACUCC CU UCAAGCACAUCCUCCGCG AAACCCCA | 5250 |
| 1023 | CCUUUCCC G CCCCUUUC | 1480 | CAAACGCC CCACCAAACUCC CU UCAACCACAUCCUCCGCC GCCAAACC | 5251 |
| 1034 | CCUUUCAC G CAAUGUGG | 1481 | CCACAUUG GGAGGAAACUCC CU UCAAGGACAUCGUCCGGC CUCAAAGG | 5252 |
| 1050 | GAUAUUCU G CUUUAAUG | 1482 | CAUUAAAC CGACGAAACUCC CU UCAACCACAUCGUCCGGC AGAAUAUC | 5253 |
| 1058 | GCUUUAAU G CCTUUAUA | 1483 | UAUAAAGG GGAGGAAACUCC CU UCAAGCACAUCGUCCGGG AUUAAAGC | 5254 |
| 1068 | CUUUAUAU G CAUGCAUA | 1484 | UAUGCAUC GGAGCAAACUCC CU UCAAGCACAUCCUCCCGG AUAUAAAG | 5255 |
| 1072 | AUAUCCAU G CAUACAAG | 1485 | CUUGUAUG GGAGCAAACUCC CU UCAAGGACAUCCUCCGGC AUGCAUAU | 5256 |
| 1103 | ACUUUCUC G CCAACUUA | 1485 | UAAGUUGC GGAGGAAACUCC CU UCAAGGACAUCGUCCGGG GAGAAAGU | 5257 |
| 1139 | CACUAUGU G AACCUUUA | 1487 | UAAAGGUU GGAGGAAACUCC CU UCAAGGACAUCGUCCGGG ACAUACUG | 5258 |
| 1155 | ACCCCGUU G CUCGGCAA | 1488 | UUGCCGAC CCAGGAAACUCC CU UCAAGCACAUCGUCCGGG AACGGGGU | 5259 |
| 1177 | UCGUCUAU G CCAAGUGU | 1489 | ACACUUGG GGAGGAAACUCC CU UCAAGGACAUCGUCCGGG AUAGACCA | 5260 |
| 1188 | AAGUGUUU G CUCACCCA | 1490 | UGCGUCAG GGAGGAAACUCC CU UCAACGACAUCGUCCGGG AAACACUU | 5261 |
| 1191 | UCUUUGCU G ACCCAACC | 1491 | CGUUGCGU GGAGCAAACUCC CU UCAAGCACAUCGUCCCGC AGCAAACA | 5262 |
| 1194 | UUGCUGAC G CAACCCCC | 1492 | GGCGCUUG GGAGCAAACUCC CU UCAAGCACAUCCUCCGCG CUCAGCAA | 5263 |
| 1234 | CCAUCACC G CAUGCGUG | 1493 | CACGCAUC CCACCAAACUCC CU UCAACCACAUCGUCCGGC CCUGAUCC | 5264 |
| 1238 | CACCGCAU G CCUCGAAC | 1494 | GUUCCACC GGAGGAAACUCC CU UCAAGCACAUCGUCCGCG AUCCGCUC | 5265 |
| 1262 | UCUCCUCU G CCCAUCCA | 1495 | UCCAUCGC CCACGAAACUCC CU UCAACGACAUCCUCCGCG AGAGGACA | 5266 |
| 1265 | CCUCUGCC G AUCCAUAC | 1496 | GUAUCGAU CCAGGAAACUCC CU UCAAGCACAUCGUCCGGG GCCAGACG | 5267 |
| 1275 | UCCAUACC G CGGAACUC | 1497 | GACUUCCG GGAGCAAACUCC CU UCAACGACAUCGUCCCGG GGUAUGGA | 5268 |
| 1290 | UCCUACCC G CUUGUUUU | 1498 | AAAACAAG CGAGCAAACUCC CU UCAAGGACAUCGUCCGGG GGCUAGCA | 5269 |
| 1299 | CUUCUEUU G CUCCCAGC | 1499 | GCUGCGAG GGAGGAAACUCC CU UCAAGGACAUCGUCCGGC AAAACAAG | 5270 |
| 1303 | UUUUGCUC G CAGCAGCU | 1500 | ACCUCCUG GGAGGAAACUCC CU UCAAGGACAUCGUCCGGC GACCAAAA | 5271 |
| 1335 | UCGGGACU G ACAAUUCU | 1501 | AGAAUUCU CGAGCAAACUCC CU UCAAGGACAUCGUCCGGG AGUCCCCA | 5272 |
| 1349 | UCUCUCGU G CUCUCCCG | 1502 | CGGCACAG GCACGAAACUCC CU UCAAGGACAUCGUCCGGG ACGACAGA | 5273 |
| 1357 | GCUCUCCC G CAAAUAUA | 1503 | UAUAUUUC GGAGGAAACUCC CU UCAAGGACAUCGUCCGGG GGCAGAGC | 5274 |
| 1382 | CCAUGCCU G CUAGGCUG | 1504 | CAGCCUAG GGAGGAAACUCC CU UCAAGGACAUCCUCCGGG ACCCAUCC | 5275 |
| 1392 | UAGCCUCU G CUGCCAAC | 1505 | GUUGGCAC CCACCAAACUCC CU UCAACCACAUCCUCCCCC ACACCCUA | 5276 |
| 1395 | CCUCUCCU G CCAACUGG | 1506 | CCAGUUGC CCACCAAACUCC CU UCAACCACAUCGUCCCCG ACCACAGC | 5277 |
| 1411 | CAUCCUAC G CGCGACCU | 1507 | ACCUCCCC CCACCAAACUCC CU UCAACCACAUCGUCCGGG GUAGGAUC | 5278 |
| 1442 | CCCUCGCC G CUGAAUCC | 1508 | CGAUUCAC CCACGAAACUCC CU UCAACGACAUCGUCCGGG GCCGACGC | 5279 |
| 1445 | UCCCCCCU G AAUCCCCC | 1509 | CCCGCAUU CGAGCAAACUCC CU UCAACCACAUCCUCCGCC ACCCCCGA | 5280 |
| 1452 | UGAAUCCC G CCGACGAC | 1510 | GUCGUCCC CGAGGAAACUCC CU UCAAGCACAUCCUCCCCC CCCAUUCA | 5281 |
| 1458 | CCCCGCAC G ACCCCUCC | 1511 | CGAGGGCU CCACCAAACUCC CU UCAACCACAUCCUCCCCC CUCCGCCC | 5282 |
| 1474 | CCCCCCCC G CUUCGGCC | 1512 | GCCCCAAC CGACCAAACUCC CU UCAACCACAUCCUCCCCC CGCCCCGC | 5283 |
| 1489 | CCUCUACC G CCCGCUUC | 1513 | GAAGCCCC CGAGCAAACUCC CU UCAACCACAUCGUCCCCG GGUACAGC | 5284 |
| 1493 | UACCCCCC G CUUCUCCG | 1514 | CGGACAAG CGAGCAAACUCC CU UCAAGGACAUCCUCCCGG GGCCGGUA | 5285 |
| 1501 | GCUUCUCC G CCUAUUGU | 1515 | ACAAUACG GCAGCAAACUCC CU UCAACGACAUCCUCCCGC CGAGAACC | 5286 |
| 1513 | AUUCUACC G ACCCUCCA | 1516 | UCGACGCU GGACGAAACUCC CU UCAACGACAUCCUCCGGG GGUACAAU | 5287 |
| 1528 | CACCCGCC G CACCUCUC | 1517 | GACACCUC GCACGAAACUCC CU UCAACGACAUCCUCCCCC CCCCCGUG | 5288 |
| 1542 | CUCUUUAC G CGGACUCC | 1518 | GGAGUCCG GGAGGAAACUCC CU UCAAGGACAUCGUCCGGG GUAAAGAG | 5289 |
| 1559 | CCGUCUGU G CCUUCUCA | 1519 | UGAGAAGG GGAGGAAACUCC CU UCAAGGACAUCCUCCGGG ACAGACGG | 5290 |
| 1571 | UCUCAUCU G CCGGACCG | 1520 | CGGUCCGG GGAGGAAACUCC CU UCAAGGACAUCGUCCGGG AGAUGAGA | 5291 |
| 1583 | GACCGUGU G CACUUCGC | 1521 | GCGAAGUG GGAGGAAACUCC CU UCAAGGACAUCGUCCGGG ACACGGUC | 5292 |
| 1590 | UCCACUUC G CUUCACCU | 1522 | AGGUGAAG GGAGGAAACUCC CU UCAAGGACAUCGUCCGGG GAAGUGCA | 5293 |
| 1601 | UCACCUCU G CACGUCGC | 1523 | GCGACGUG GGAGGAAACUCC CU UCAAGGACAUCGUCCGGG AGAGGUGA | 5294 |
| 1608 | UGCACGUC G CAUGGAGA | 1524 | UCUCCAUG GGAGGAAACUCC CU UCAAGGACAUCGUCCGGG GACGUGCA | 5295 |
| 1624 | ACCACCGU G AACGCCCA | 1525 | UGGGCGUU GGAGGAAACUCC CU UCAAGGACAUCGUCCGGG ACGGUGGU | 5296 |
| 1628 | CCGUGAAC G CCCACAGG | 1526 | CCUGUGGG GGAGGAAACUCC CU UCAAGGACAUCGUCCGGG GUUCACGG | 5297 |
| 1642 | AGGAACCU G CCCAAGGU | 1527 | ACCUUGGG GGAGGAAACUCC CU UCAAGGACAUCGUCCGGG AGGUUCCU | 5298 |
| 1654 | AAGGUCUU G CAUAAGAG | 1528 | CUCUUAUG GGAGGAAACUCC CU UCAAGGACAUCGUCCGGG AAGACCUU | 5299 |
| 1690 | AUGUCAAC G ACCGACCU | 1529 | AGGUCGGU GGAGGAAACUCC CU UCAAGGACAUCGUCCGGG GUUGACAU | 5300 |
| 1694 | CAACGACC G ACCUUGAG | 1530 | CUCAAGGU GGAGGAAACUCC CU UCAAGGACAUCGUCCGGG GGUCGUUG | 5301 |
| 1700 | CCGACCUU G AGGCAUAC | 1531 | GUAUGCCU GGAGGAAACUCC CU UCAAGGACAUCGUCCGGG AAGGUCGG | 5302 |
| 1730 | UGUUUAAU G AGUGGGAG | 1532 | CUCCCACU GGAGGAAACUCC CU UCAAGGACAUCGUCCGGG AUUAAACA | 5303 |
| 1818 | AGCACCAU G CAACUUUU | 1533 | AAAAGUUG GGAGGAAACUCC CU UCAAGGACAUCGUCCGGG AUGGUGCU | 5304 |
| 1835 | UCACCUCU G CCUAAUCA | 1534 | UGAUUAGG GGAGGAAACUCC CU UCAAGGACAUCGUCCGGG AGAGGUGA | 5305 |
| 1883 | CAAGCUGU G CCUUGGGU | 1535 | ACCCAAGG GGAGGAAACUCC CU UCAAGGACAUCGUCCGGG ACAGCUUG | 5306 |
| 1912 | UGGACAUU G ACCCGUAU | 1536 | AUACGGGU GGAGGAAACUCC CU UCAAGGACAUCGUCCGGG AAUGUCCA | 5307 |
| 1959 | UCUTUUUU G CCUUCUGA | 1537 | UCAGAAGG GGAGGAAACUCC CU UCAAGGACAUCGUCCGGG AAAAAAGA | 5308 |
| 1966 | UGCCUUCU G ACUUCUUU | 1538 | AAAGAAGU GGAGGAAACUCC CU UCAAGGACAUCGUCCGGG AGAAGGCA | 5309 |
| 1985 | UUCUAUUC G AGAUCUCC | 1539 | GGAGAUCU GGAGGAAACUCC CU UCAAGGACAUCGUCCGGG GAAUAGAA | 5310 |
| 1996 | AUCUCCUC G ACACCGCC | 1540 | GGCGGUGU GGAGGAAACUCC CU UCAAGGACAUCGUCCGGG GAGGAGAU | 5311 |
| 2002 | UCCACACC G CCUCUGCU | 1541 | AGCAGAGG GGAGGAAACUCC CU UCAAGGACAUCGUCCGGG GGUGUCCA | 5312 |
| 2008 | CCGCCUCU G CUCUCUAU | 1542 | AUACAGAG GGAGGAAACUCC CU UCAAGGACAUCGUCCGGG AGACGCGC | 5313 |
| 2092 | GUUGGGGU G AGUUGAUG | 1543 | CAUCAACU GGAGGAAACUCC CU UCAAGGACAUCGUCCGGG ACCCCAAC | 5314 |
| 2097 | GGUGAGUU G AUGAAUCU | 1544 | AGAUUCAU GGAGGAAACUCC CU UCAAGGACAUCGUCCGGG AACUCACC | 5315 |
| 2100 | CAGUUGAU G AAUCUAGC | 1545 | GCUAGAUU GGAGGAAACUCC CU UCAAGGACAUCGUCCGGG AUCAACUC | 5316 |
| 2237 | UUUUGGGC G AGAAACUC | 1546 | CAGUUUCU GGAGGAAACUCC CU UCAAGGACAUCGUCCGGG GCCCAAAA | 5317 |
| 2251 | CUGUUCUU G AAUAUUUG | 1547 | CAAAUAUU GGAGGAAACUCC CU UCAAGGACAUCGUCCGGG AAGAACAG | 5318 |
| 2282 | GUGGAUUC G CACUCCUC | 1548 | CACCACUC GGAGGAAACUCC CU UCAAGGACAUCGUCCGGG GAAUCCAC | 5319 |
| 2293 | CUCCUCCU G CAUAUAGA | 1549 | UCUAUAUC GCAGGAAACUCC CU UCAAGCACAUCGUCCGCG ACCAGGAC | 5320 |
| 2311 | CACCAAAU G CCCCUAUC | 1550 | CAUAGGGG GGAGGAAACUCC CU UCAAGCACAUCGUCCGGG AUUUGGUG | 5321 |
| 2354 | UGUUAGAC G AAGAGGCA | 1551 | UGCCUCUU GCAGGAAACUCC CU UCAAGGACAUCCUCCGGG GUCUAACA | 5322 |
| 2388 | ACUCCCUC G CCUCGCAG | 1552 | CUCCCACC GCACGAAACUCC CU UCAAGGACAUCGUCCCGC CAGCGACU | 5323 |
| 2393 | CUCCCCUC G CAGACGAA | 1553 | UUCGUCUG GCACGAAACUCC CU UCAAGGACAUCCUCCGGC CACCCGAG | 5324 |
| 2399 | UCGCACAC G AAGCUCUC | 1554 | GACACCUU GGAGGAAACUCC CU UCAAGGACAUCGUCCCGG CUCUGCGA | 5325 |
| 2412 | UCUCAAUC G CCCCCUCC | 1555 | CGACGCCC CCACGAAACUCC CU UCAAGGACAUCGUCCGGG CAUUCACA | 5326 |
| 2415 | CAAUCGCC G CGUCGCAG | 1556 | CUGCGACG GGAGGAAACUCC CU UCAAGGACAUCGUCCGGG GGCGAUUG | 5327 |
| 2420 | GCCGCGUC G CAGAAGAU | 1557 | AUCUUCUG CGAGGAAACUCC CU UCAAGGACAUCCUCCGGG GACCCCGC | 5328 |
| 2514 | CGUACCUU G CUUUAAUC | 1558 | GAUUAAAG GGACGAAACUCC CU UCAACCACAUCGUCCGCG AAGCUACC | 5329 |
| 2549 | CUUUUCCU G ACAUUCAU | 1559 | AUGAAUCU GGAGGAAACUCC CU UCAAGCACAUCGUCCGGG AGGAAAAC | 5330 |
| 2560 | AUUCAUUU G CAGGAGGA | 1560 | UCCUCCUG GGAGGAAACUCC CU UCAAGCACAUCCUCCGCG AAAUGAAU | 5331 |
| 2576 | ACAUUGUU G AUACAUGU | 1561 | ACAUCUAU GCAGGAAACUCC CU UCAAGGACAUCGUCCGGG AACAAUGU | 5332 |
| 2615 | CAGUAAAU G AAAACAGC | 1562 | CCUGUUUU GCAGGAAACUCC CU UCAAGGACAUCGUCCGGG AUUUACUG | 5333 |
| 2641 | UUAACUAU G CCUCCUAC | 1563 | CUAGCAGG GCAGGAAACUCC CU UCAAGGACAUCGUCCGGG AUACUUAA | 5334 |
| 2645 | CUAUGCCU G CUAGCUUU | 1564 | AAACCUAG GCAGCAAACUCC CU UCAAGCACAUCCUCCCGC AGCCAUAC | 5335 |
| 2677 | AAAUAUUU G CCCUUACA | 1565 | UCUAAGCG GCACGAAACUCC CU UCAAGGACAUCCUCCGGC AAAUAUUU | 5336 |
| 2740 | CUCCAGAC G CGACAUUA | 1566 | UAAUGUCG GCACCAAACUCC CU UCAAGGACAUCCUCCGCC CUCUCCAA | 5337 |
| 2742 | CCACACGC G ACAUUAUU | 1567 | AAUAAUCU GGACGAAACUCC CU UCAACGACAUCGUCCCGC GCGUCUGG | 5338 |
| 2804 | CACGUAGC G CCUCAUUU | 1568 | AAAUGAGG CGACGAAACUCC CU UCAAGGACAUCGUCCCGG GCUACGUG | 5339 |
| 2814 | CUCAUUUU G CCGCUCAC | 1569 | GUGACCCG CGACGAAACUCC CU UCAAGGACAUCGUCCCGG AAAAUGAG | 5340 |
| 2875 | CAAACCUC G AAAACGCA | 1570 | UGCCUUUU GCACCAAACUCC CU UCAACGACAUCGUCCGGC CAGCUUUC | 5341 |
| 2928 | UCUUCCCC G AUCAUCAG | 1571 | CUGAUCAU GGAGGAAACUCC CU UCAAGGACAUCGUCCGGG GGGGAAGA | 5342 |
| 2946 | UCGACCCU G CAUUCAAA | 1572 | UUUCAAUC GGAGGAAACUCC CU UCAACGACAUCGUCCGCG ACCGUCCA | 5343 |
| 2990 | CUCAACCC G CACAACGA | 1573 | UCCUUCUC CGAGGAAACUCC CU UCAAGCACAUCCUCCCCG GCCUUGAC | 5344 |
| 3012 | GGCCCGAC G CCAACAAC | 1574 | CUUCUUCC CCACCAAACUCC CU UCAAGCACAUCCUCCGCC CUCCCCCC | 5345 |
| 3090 | CCCCUCAC G CUCAGCGC | 1575 | CCCCUCAC CCACCAAACUCC CU UCAACCACAUCCUCCCCC CUCACCCC | 5346 |
| 3113 | ACAACUGU G CCACCAGC | 1576 | CCUCCUCC CCACCAAACUCC CU UCAAGCACAUCCUCCCCC ACACUUGU | 5347 |
| 3132 | CUCCUCCU G CCUCCACC | 1577 | GGUGGAGG GGACCAAACUCC CU UCAAGGACAUCGUCCGCG ACCACCAC | 5348 |
| 51 | ACGCCCCU G UACUUUCC | 1578 | CGAAAGUA GCACCAAACUCC CU UCAAGCACAUCCUCCGCG ACCCCCCU | 5349 |
| 106 | AGAAUACU G UCUCUCCC | 1579 | GGCACACA GCACCAAACUCC CU UCAAGCACAUCCUCCCCC ACUAUUCU | 5350 |
| 148 | CGCACCCU G UACCCAAC | 1580 | CUUCCCUA GCACGAAACUCC CU UCAACCACAUCCUCCGCG ACGCUCCC | 5351 |
| 198 | CUGCUCCU G UUACAGGC | 1581 | CCCUCUAA CCACCAAACUCC CU UCAAGCACAUCCUCCCCG ACGAGCAG | 5352 |
| 219 | UUUUUCUU G UUCACAAA | 1582 | UUUCUCAA CCACCAAACUCC CU UCAAGGACAUCCUCCCCG AACAAAAA | 5353 |
| 297 | ACACCCCU G UCUCUUCG | 1583 | CCAAGACA GCACGAAACUCC CU UCAACCACAUCCUCCCCC ACGCCUGU | 5354 |
| 299 | ACCCCUCU G UCUUGGCC | 1584 | GCCCAAGA CCAGGAAACUCC CU UCAACCACAUCCUCCCCC ACACGGGU | 5355 |
| 347 | ACCAACCU G UUGUCCUC | 1585 | GACCACAA CCACGAAACUCC CU UCAACGACAUCCUCCCGC ACGUUCCU | 5356 |
| 350 | AACCUCUU G UCCUCCAA | 1586 | UUGCACCA CGACCAAACUCC CU UCAACGACAUCCUCCCGC AACACCUU | 5357 |
| 362 | UCCAAUUU G UCCUGCUU | 1587 | AACCACGA CGAGGAAACUCC CU UCAACCACAUCCUCCCGG AAAUUCCA | 5358 |
| 381 | CGCUGCAU G UGUCUCCC | 1588 | CCCACACA GGAGCAAACUCC CU UCAAGGACAUCGUCCCGC AUCCAGCG | 5359 |
| 383 | CUCCAUGU G UCUGCCGC | 1589 | GCCCCACA CCAGCAAACUCC CU UCAACCACAUCCUCCCCC ACAUCCAG | 5360 |
| 438 | AUCUUCUU G UUCGUUCU | 1590 | AGAACCAA GGACCAAACUCC CU UCAACGACAUCGUCCCGC AACAAGAU | 5361 |
| 465 | CAACCUAU G UUCCCCCU | 1591 | ACCGCCAA CGAGGAAACUCC CU UCAAGCACAUCCUCCGGG AUACCUUG | 5362 |
| 476 | GCCCGUUU G UCCUCUAA | 1592 | UUAGAGGA GGAGGAAACUCC CU UCAAGGACAUCGUCCGGG AAACGGGC | 5363 |
| 555 | ACCUCUAU G UUUCCCUC | 1593 | GAGGGAAA GGACGAAACUCC CU UCAAGGACAUCGUCCGGG AUAGAGGU | 5364 |
| 566 | UCCCUCAU G UUGCUGUA | 1594 | UACAGCAA GGAGGAAACUCC CU UCAAGGACAUCGUCCGGG AUGAGCGA | 5365 |
| 572 | AUGUUGCU G UACAAAAC | 1595 | GUUUUGUA GGAGGAAACUCC CU UCAAGGACAUCGUCCGGG AGCAACAU | 5366 |
| 602 | CUGCACCU G UAUUCCCA | 1596 | UCGCAAUA GCAGGAAACUCC CU UCAAGGACAUCGUCCGGG AGGUCCAG | 5367 |
| 694 | UCCCAUUU G UUCAGUGG | 1597 | CCACUGAA GCAGGAAACUCC CU UCAAGGACAUCGUCCCCG AAAUGCCA | 5368 |
| 724 | CCCCCACU G UCUGGCUU | 1598 | AAGCCAGA GCACGAAACUCC CU UCAAGGACAUCGUCCGCG ACUGGCGC | 5369 |
| 750 | UGCAUGAU G UGGUUUUG | 1599 | CAAAACCA GCACGAAACUCC CU UCAAGGACAUCGUCCGGG AUCAUCCA | 5370 |
| 771 | CCAAGUCU G UACAACAU | 1600 | AUGUUGUA GCAGCAAACUCC CU UCAACGACAUCGUCCCGC ACACUUGG | 5371 |
| 801 | AUGCCGCU G UUACCAAU | 1601 | AUUCGUAA GCACGAAACUCC CU UCAAGGACAUCGUCCGGG AGCGGCAU | 5372 |
| 818 | UUUCUUUU G UCUUUGGG | 1602 | CCCAAACA GCACCAAACUCC CU UCAACGACAUCGUCCGCG AAAAGAAA | 5373 |
| 888 | UGCGAUAU G UAAUUCGG | 1603 | CCCAAUUA CGACGAAACUCC CU UCAAGCACAUCGUCCGGG AUAUCCCA | 5374 |
| 927 | AACAUAUU G UACAAAAA | 1604 | UUUUUGUA GCAGGAAACUCC CU UCAAGCACAUCGUCCGGG AAUAUGUU | 5375 |
| 944 | AUCAAAAU G UCUUUUAC | 1605 | CUAAAACA GGAGGAAACUCC CU UCAAGCACAUCGUCCGGG AUUUUGAU | 5376 |
| 946 | CAAAAUGU G UTUUAGGA | 1606 | UCCUAAAA CCACGAAACUCC CU UCAAGGACAUCGUCCCGG ACAUUUUG | 5377 |
| 963 | AACUUCCU G UAAACAGC | 1607 | CCUCUUUA CGAGGAAACUCC CU UCAAGCACAUCCUCCCGG AGGAAGUU | 5378 |
| 991 | GAAAGUAU G UCAACGAA | 1608 | UUCGUUGA CCACCAAACUCC CU UCAAGCACAUCGUCCGGC AUACUUUC | 5379 |
| 1002 | AACCAAUU G UGGGUCUU | 1609 | AACACCCA GGAGGAAACUCC CU UCAAGCACAUCCUCCCGC AAUUCCUU | 5380 |
| 1039 | CACCCAAU G UGGAUAUU | 1610 | AAUAUCCA GGAGCAAACUCC CU UCAAGCACAUCCUCCCGC AUUGCCUG | 5381 |
| 1137 | AACAGUAU G UCAACCUU | 1611 | AACGUUCA CGAGCAAACUCC CU UCAAGCACAUCGUCCGGC AUACUCUU | 5382 |
| 1184 | UCCCAAGU G UUUCCUGA | 1612 | UCAGCAAA CGAGCAAACUCC CU UCAAGCACAUCCUCCCGC ACUUGCCA | 5383 |
| 1251 | GAACCUUU G UGUCUCCU | 1613 | ACCACACA CGAGCAAACUCC CU UCAACCACAUCCUCCCGG AAACCUUC | 5384 |
| 1253 | ACCUUUGU G UCUCCUCU | 1614 | AGACCAGA CCAGCAAACUCC CU UCAACCACAUCCUCCCCC ACAAACGU | 5385 |
| 1294 | AGCCCCUU G UUUUCCUC | 1615 | CACCAAAA CGAGCAAACUCC CU UCAAGCACAUCCUCCGCC AACCGCCU | 5386 |
| 1344 | ACAAUUCU G UCCUCCUC | 1616 | GACCACCA CCACCAAACUCC CU UCAACCACAUCCUCCCCC ACAAUUGU | 5387 |
| 1390 | CCUACCCU G UCCUCCCA | 1617 | UCCCAGCA CGACCAAACUCC CU UCAAGCACAUCCUCCCCC AGCCUAGC | 5388 |
| 1425 | CCUCCUUU G UUUACGUC | 1618 | GACGUAAA CCACCAAACUCC CU UCAACCACAUCCUCCCGC AAAGCACC | 5389 |
| 1508 | CCCCUAUU G UACCCACC | 1619 | GCUCCGUA CCAGCAAACUCC CU UCAACCACAUCCUCCCGC AAUACCCC | 5390 |
| 1557 | CCCCCUCU G UCCCUUCU | 1620 | ACAACGCA CCAGCAAACUCC CU UCAACCACAUCCUCCCGC AGACCCCC | 5391 |
| 1581 | CCCACCCU G UCCACUUC | 1621 | GAACUGCA GCAGCAAACUCC CU UCAACCACAUCCUCCCGC ACCGUCCC | 5392 |
| 1684 | UCACCAAU G UCAACCAC | 1622 | GUCCUUCA GCACCAAACUCC CU UCAACCACAUCCUCCCCC AUUGCUCA | 5393 |
| 1719 | CAAAGACU G UCUCUUUA | 1623 | UAAACACA GCACCAAACUCC CU UCAACGACAUCCUCCCCC ACUCUUUC | 5394 |
| 1721 | AACACUGU G UCUTUAAU | 1624 | AUUAAACA CCACGAAACUCC CU UCAACGACAUCCUCCCGC ACAGUCUU | 5395 |
| 1723 | GACUCUCU G UUUAAUCA | 1625 | UCAUUAAA GCACGAAACUCC CU UCAACGACAUCCUCCCCC ACACAGUC | 5396 |
| 1772 | ACCUCUUU G UACUACCA | 1626 | UCCUACUA GCACGAAACUCC CU UCAACGACAUCCUCCCGC AAAGACCU | 5397 |
| 1785 | ACGACCCU G UACCCAUA | 1627 | UAUCCCUA GCACGAAACUCC CU UCAACGACAUCGUCCGGC AGCCUCCU | 5398 |
| 1801 | AAAUUCGU G UGUUCACC | 1628 | GCUCAACA GCACGAAACUCC CU UCAACCACAUCGUCCGCG ACCAAUUU | 5399 |
| 1803 | AUUGGUGU G UUCACCAG | 1629 | CUGGUGAA GGAGGAAACUCC CU UCAAGGACAUCGUCCGGG ACACCAAU | 5400 |
| 1850 | CAUCUCAU G UUCAUGUC | 1630 | GACAUGAA GGAGGAAACUCC CU UCAAGGACAUCGUCCGGG AUGAGAUG | 5401 |
| 1856 | AUGUUCAU G UCCUACUG | 1631 | CAGUAGGA GGAGGAAACUCC CU UCAAGGACAUCGUCCGGG AUGAACAU | 5402 |
| 1864 | GUCCUACU G UUCAAGCC | 1632 | GGCUUGAA GGAGGAAACUCC CU UCAAGGACAUCGUCCGGG AGUAGGAC | 5403 |
| 1881 | UCCAAGCU G UGCCUUGG | 1633 | CCAAGGCA GGAGGAAACUCC CU UCAAGGACAUCGUCCGGG AGCUUGGA | 5404 |
| 1939 | GAGCUUCU G UGGAGUUA | 1634 | UAACUCCA GGAGGAAACUCC CU UCAAGGACAUCGUCCGGG AGAAGCUC | 5405 |
| 2013 | UCUGCUCU G UAUCGGGG | 1635 | CCCCGAUA GGAGGAAACUCC CU UCAAGGACAUCGUCCGGG AGAGCAGA | 5406 |
| 2045 | GGAACAUU G UUCACCUC | 1636 | GAGGUGAA GGAGGAAACUCC CU UCAAGGACAUCGUCCGGG AAUGUUCC | 5407 |
| 2082 | GCUAUUCU G UGUUGGGG | 1637 | CCCCAACA GGAGGAAACUCC CU UCAAGGACAUCGUCCGGG AGAAUAGC | 5408 |
| 2084 | UAUUCUGU G UUGGGGUG | 1638 | CACCCCAA GGAGGAAACUCC CU UCAAGGACAUCGUCCGGG ACAGAAUA | 5409 |
| 2167 | UCAGCUAU G UCAACGUU | 1639 | AACGUUGA GGAGGAAACUCC CU UCAAGGACAUCGUCCGGG AUAGCUGA | 5410 |
| 2205 | CAACUAUU G UGGLUUCA | 1640 | UGAAACCA GGAGGAAACUCC CU UCAAGGACAUCGUCCGGG AAUAGUUG | 5411 |
| 2222 | CAUUUCCU G UCUUACUU | 1641 | AAGUAAGA GGAGGAAACUCC CU UCAAGGACAUCGUCCGGG AGGAAAUG | 5412 |
| 2245 | GAGAAACU G UUCUUGAA | 1642 | UUCAAGAA GGAGGAAACUCC CU UCAAGGACAUCGUCCGGG AGUUUCUC | 5413 |
| 2262 | UAUUUGGU G UCUUUUGG | 1643 | CCAAAAGA GGAGGAAACUCC CU UCAAGGACAUCGUCCGGG ACCAAAUA | 5414 |
| 2274 | UUUGGAGU G UGGAUUCG | 1644 | CGAAUCCA GGAGGAAACUCC CU UCAAGGACAUCGUCCGGG ACUCCAAA | 5415 |
| 2344 | AAACUACU G UUGUUAGA | 1645 | UCUAACAA GGAGGAAACUCC CU UCAAGGACAUCGUCCGGG AGUAGUUU | 5416 |
| 2347 | CUACUGUU G UUAGACGA | 1646 | UCGUCUAA GGAGGAAACUCC CU UCAAGGACAUCGUCCGGG AACAGUAG | 5417 |
| 2450 | AUCUCAAU G UUAGUAUU | 1647 | AAUACUAA GGAGGAAACUCC CU UCAAGGACAUCGUCCGGG AUUGAGAU | 5418 |
| 2573 | AGGACAUU G UUGAUAGA | 1648 | UCUAUCAA GGAGGAAACUCC CU UCAAGGACAUCGUCCGGG AAUGUCCU | 5419 |
| 2583 | UGAUAGAU G UAAGCAAU | 1649 | AUUGCUUA GGAGGAAACUCC CU UCAAGGACAUCGUCCGGG AUCUAUCA | 5420 |
| 2594 | AGCAAUUU G UGGGGCCC | 1650 | GGGCCCCA GGAGGAAACUCC CU UCAAGGACAUCGUCCGGG AAAUUGCU | 5421 |
| 2663 | AUCCCAAU G UUACUAAA | 1651 | UUUAGUAA GGAGGAAACUCC CU UCAAGGACAUCGUCCGGG AUUGGGAU | 5422 |
| 2717 | CAGAGUAU G UAGUUAAU | 1652 | AUUAACUA GGAGGAAACUCC CU UCAAGGACAUCGUCCGGG AUACUCUG | 5423 |
| 2901 | AUCUUUCU G UCCCCAAU | 1653 | AUUGGGGA GGAGGAAACUCC CU UCAAGGACAUCGUCCGGG AGAAAGAU | 5424 |
| 3071 | GGGGGACU G UUGGGGUG | 1654 | CACCCCAA GGAGGAAACUCC CU UCAAGGACAUCGUCCGGG AGUCCCCC | 5425 |
| 3111 | UCACAACU G UGCCAGCA | 1655 | UGCUGGCA GGAGGAAACUCC CU UCAAGGACAUCGUCCGGG AGUUGUGA | 5426 |
| 40 | AUCCCAGA G UCAGGGCC | 1656 | GGCCCUGA GGAGGAAACUCC CU UCAAGGACAUCGUCCGGG UCUGGGAU | 5427 |
| 46 | GAGUCAGG G CCCUGUAC | 1657 | GUACAGGG GGAGGAAACUCC CU UCAAGGACAUCGUCCGGG CCUGACUC | 5428 |
| 65 | UCCUGCUG G UGGCUCCA | 1658 | UGGAGCCA GGAGGAAACUCC CU UCAAGGACAUCGUCCGGG CAGCAGGA | 5429 |
| 68 | UCCUGGUG G CUCCAGUU | 1659 | AACUGGAG GGAGGAAACUCC CU UCAAGGACAUCGUCCGGG CACCAGCA | 5430 |
| 74 | UGGCUCCA G UUCAGGAA | 1660 | UUCCUGAA GGAGGAAACUCC CU UCAAGGACAUCGUCCGGG UGGAGCCA | 5431 |
| 85 | CAGGAACA G UGAGCCCU | 1661 | AGGGCUCA GGAGGAAACUCC CU UCAAGGACAUCGUCCGGG UGUUCCUG | 5432 |
| 89 | AACAGUGA G CCCUGCUC | 1662 | GAGCAGGG GGAGGAAACUCC CU UCAAGGACAUCGUCCGGG UCACUGUU | 5433 |
| 120 | GCCAUAUC G UCAAUCUU | 1663 | AAGAUUGA GGAGGAAACUCC CU UCAAGGACAUCGUCCGGG GAUAUGGC | 5434 |
| 196 | CCCUGCUC G UGUUACAG | 1664 | CUGUAACA GGAGGAAACUCC CU UCAAGGACAUCGUCCGGG GAGCAGGG | 5435 |
| 205 | UGUUACAG G CGGGGUUU | 1665 | AAACCCCG GGAGGAAACUCC CU UCAAGGACAUCGUCCGGG CUGUAACA | 5436 |
| 210 | CAGGCGGG G UUUUUCUU | 1666 | AAGAAAAA GGAGGAAACUCC CU UCAAGGACAUCGUCCGGG CCCGCCUG | 5437 |
| 248 | ACCACAGA G UCUAGACU | 1667 | AGUCUAGA GGAGGAAACUCC CU UCAAGGACAUCGUCCGGG UCUGUGGU | 5438 |
| 258 | CUAGACUC G UGGUGGAC | 1668 | GUCCACCA GGAGGAAACUCC CU UCAAGGACAUCGUCCGGG GAGUCUAG | 5439 |
| 261 | GACUCGUG G UGGACUUC | 1669 | GAAGUCCA GGAGGAAACUCC CU UCAAGGACAUCGUCCGGG CACGAGUC | 5440 |
| 295 | GAACACCC G UGUGUCUU | 1670 | AAGACACA GGAGGAAACUCC CU UCAAGGACAUCGUCCGGG GGGUGUUC | 5441 |
| 305 | GUGUCUUG G CCAAAAUU | 1671 | AAUUUUGG GGAGGAAACUCC CU UCAAGGACAUCGUCCGGG CAAGACAC | 5442 |
| 318 | AAUUCGCA G UCCGAAAU | 1672 | AUUUGGGA GGAGGAAACUCC CU UCAAGGACAUCGUCCGGG UGCGAAUU | 5443 |
| 332 | AAUCUCCA G UCACUCAC | 1673 | GUGAGUGA GGAGGAAACUCC CU UCAAGGACAUCGUCCGGG UGGAGAUU | 5444 |
| 368 | UUGUCCUG G UUAUCGCU | 1674 | AGCGAUAA GGAGGAAACUCC CU UCAAGGACAUCGUCCGGG CAGGACAA | 5445 |
| 390 | UGUCUGCG G CGUUUUAU | 1675 | AUAAAACG GGAGGAAACUCC CU UCAAGGACAUCGUCCGGG CGCAGACA | 5446 |
| 392 | UCUGCGGC G UUUUAUCA | 1676 | UGAUAAAA GGAGGAAACUCC CU UCAAGGACAUCGUCCGGG GCCGCAGA | 5447 |
| 442 | UCUUGUUG G UUCUUCUG | 1677 | CAGAAGAA GGAGGAAACUCC CU UCAAGGACAUCGUCCGGG CAACAAGA | 5448 |
| 461 | CUAUCAAG G UAUGUUGC | 1678 | GCAACAUA GGAGGAAACUCC CU UCAAGGACAUCGUCCGGG CUUGAUAG | 5449 |
| 472 | UGUUGCCC G UUUGUCCU | 1679 | AGGACAAA GGAGGAAACUCC CU UCAAGGACAUCGUCCGGG GGGCAACA | 5450 |
| 506 | AACAACCA G CACCGGAC | 1680 | GUCCGGUG GGAGGAAACUCC CU UCAAGGACAUCGUCCGGG UGGUUGUU | 5451 |
| 625 | CAUCUUGG G CUUUCGCA | 1681 | UGCGAAAG GGAGGAAACUCC CU UCAAGGACAUCGUCCGGG CCAAGAUG | 5452 |
| 648 | CUAUGGGA G UGGGCCUC | 1682 | GAGGCCCA GGAGGAAACUCC CU UCAAGGACAUCGUCCGGG UCCCAUAG | 5453 |
| 652 | GGGAGUGG G CCUCAGUC | 1683 | GACUGAGG GGAGGAAACUCC CU UCAAGGACAUCGUCCGGG CCACUCCC | 5454 |
| 658 | GGGCCUCA G UCCGUUUC | 1684 | GAAACGGA GGAGGAAACUCC CU UCAAGGACAUCGUCCGGG UGAGGCCC | 5455 |
| 662 | CUCAGUCC G UUUCUCUU | 1685 | AAGAGAAA GGAGGAAACUCC CU UCAAGGACAUCGUCCGGG GGACUGAG | 5456 |
| 672 | UUCUCUUG G CUCAGUUU | 1686 | AAACUGAG GGAGGAAACUCC CU UCAAGGACAUCGUCCGGG CAAGAGAA | 5457 |
| 677 | UUGGCUCA G UUUACUAG | 1687 | CUAGUAAA GGAGGAAACUCC CU UCAAGGACAUCGUCCGGG UGAGCCAA | 5458 |
| 685 | GUUUACUA G UGCCAUUU | 1688 | AAAUGGCA GGAGGAAACUCC CU UCAAGGACAUCGUCCGGG UAGUAAAC | 5459 |
| 699 | UUUGUUCA G UGGUUCGU | 1689 | ACGAACCA GGAGGAAACUCC CU UCAAGGACAUCGUCCGGG UGAACAAA | 5460 |
| 702 | GUUCAGUG G UUCGUAGG | 1690 | CCUACGAA GGAGGAAACUCC CU UCAAGGACAUCGUCCGGG CACUGAAC | 5461 |
| 706 | AGUGGUUC G UAGGGCUU | 1691 | AAGCCCUA GGAGGAAACUCC CU UCAAGGACAUCGUCCGGG GAACCACU | 5462 |
| 711 | UUCGUAGG G CUUUCCCC | 1692 | GGGGAAAG GGAGGAAACUCC CU UCAAGGACAUCGUCCGGG CCUACGAA | 5463 |
| 729 | ACUGUCUG G CUUUCAGU | 1693 | ACUGAAAG GGAGGAAACUCC CU UCAAGGACAUCGUCCGGG CAGACAGU | 5464 |
| 736 | GGCUUUCA G UUAUAUGG | 1694 | CCAUAUAA GGAGGAAACUCC CU UCAAGGACAUCGUCCGGG UGAAAGCC | 5465 |
| 753 | AUGAUGUG G UUUUGGGG | 1695 | CCCCAAAA GGAGGAAACUCC CU UCAAGGACAUCGUCCGGG CACAUCAU | 5466 |
| 762 | UUUUGGGG G CCAAGUCU | 1696 | AGACUUGG GGAGGAAACUCC CU UCAAGGACAUCGUCCGGG CCCCAAAA | 5467 |
| 767 | GGGGCCAA G UCUGUACA | 1697 | UGUACAGA GGAGGAAACUCC CU UCAAGGACAUCGUCCGGG UUGGCCCC | 5468 |
| 785 | CAUCUUGA G UCCCUUUA | 1698 | UAAAGGGA GGAGGAAACUCC CU UCAAGGACAUCGUCCGGG UCAAGAUG | 5469 |
| 826 | GUCUUUGG G UAUACAUU | 1699 | AAUGUAUA GGAGGAAACUCC CU UCAAGGACAUCGUCCGGG CCAAAGAC | 5470 |
| 898 | AAUUGGGA G UUGGGGCA | 1700 | UGCCCCAA GGAGGAAACUCC CU UCAAGGACAUCGUCCGGG UCCCAAUU | 5471 |
| 904 | GAGUUGGG G CACAUUGC | 1701 | GCAAUGUG GGAGGAAACUCC CU UCAAGGACAUCGUCCGGG CCCAACUC | 5472 |
| 971 | GUAAACAG G CCUAUUGA | 1702 | UCAAUAGG GGAGGAAACUCC CU UCAAGGACAUCGUCCGGG CUGUUUAC | 5473 |
| 987 | AUUGGAAA G UAUGUCAA | 1703 | UUGACAUA GGAGGAAACUCC CU UCAAGGACAUCGUCCGGG UTUCCAAU | 5474 |
| 1006 | AAUUGUGG G UCUUUUCG | 1704 | CCAAAAGA GGAGGAAACUCC CU UCAAGGACAUCGUCCGCG CCACAAUU | 5475 |
| 1016 | CUUUUGGG G UUUGCCCC | 1705 | GCGGCAAA GGAGGAAACUCC CU UCAAGGACAUCGUCCGGG CCCAAAAC | 5476 |
| 1080 | GCAUACAA G CAAAACAG | 1706 | CUGUUUUG GGAGGAAACUCC CU UCAACGACAUCGUCCCCC UUGUAUGC | 5477 |
| 1089 | CAAAACAG G CUUUUACU | 1707 | ACUAAAAG GCAGCAAACUCC CU UCAACGACAUCGUCCCGG CUCUUUUC | 5478 |
| 1116 | CUUACAAC G CCUUUCUA | 1708 | UACAAAGC GCAGCAAACUCC CU UCAACCACAUCCUCCGGG CUUGUAAG | 5479 |
| 1126 | CUUUCUAA G UAAACACU | 1709 | ACUGUUUA GGACGAAACUCC CU UCAACGACAUCCUCCCGC UUACAAAC | 5480 |
| 1133 | AGUAAACA G UAUCUCAA | 1710 | UUCACAUA CCACCAAACUCC CU UCAACCACAUCCUCCCCC UCUUUACU | 5481 |
| 1152 | UUUACCCC G UUGCUCCC | 1711 | CCCAGCAA CGAGCAAACUCC CU UCAAGGACAUCCUCCGCG CCGCUAAA | 5482 |
| 1160 | GUUGCUCG G CAACCCCC | 1712 | CCCCCUUG CGACGAAACUCC CU UCAAGGACAUCCUCCGCG CCACCAAC | 5483 |
| 1166 | CCGCAACC G CCUGGUCU | 1713 | ACACCACG GCAGCAAACUCC CU UCAAGCACAUCGUCCGGC CGUUCCCG | 5484 |
| 1171 | ACCGCCUC G UCUAUCCC | 1714 | CGCAUAGA GCAGCAAACUCC CU UCAACGACAUCGUCCCGC CACGCCCU | 5485 |
| 1182 | UAUGCCAA G UCUUUGCU | 1715 | ACCAAACA GCACCAAACUCC CU UCAACGACAUCCUCCCCC UUCCCAUA | 5486 |
| 1207 | CCCCACUG G UUCCCCCU | 1716 | ACCCCCAA CGAGGAAACUCC CU UCAACGACAUCGUCCGCG CACUGCGG | 5487 |
| 1213 | UGCUUCGC G CUUCCCCA | 1717 | UGCCCAAG CCACCAAACUCC CU UCAACGACAUCGUCCGGG CCCAACCA | 5488 |
| 1218 | GCCGCUUG G CCAUAGGC | 1718 | GCCUAUCC CCAGGAAACUCC CU UCAACGACAUCCUCCCCG CAAGCCCC | 5489 |
| 1225 | CGCCAUAC G CCAUCACC | 1719 | CCUCAUCC CCACCAAACUCC CU UCAACCACAUCCUCCCCC CUAUCCCC | 5490 |
| 1232 | CCCCAUCA G CGCAUCCC | 1720 | CCCAUCCC CCACCAAACUCC CU UCAACCACAUCCUCCCGC UGAUCGCC | 5491 |
| 1240 | CCCCAUCC G UCCAACCU | 1721 | ACCUUCCA GCACCAAACUCC CU UCAACCACAUCCUCCCCC CCAUCCCC | 5492 |
| 1287 | AACUCCUA G CCCCUUCU | 1722 | ACAACCCC CCACCAAACUCC CU UCAACCACAUCCUCCCGC UACCACUU | 5493 |
| 1306 | UCCUCCCA G CACCUCUC | 1723 | CACACCUC CCACCAAACUCC CU UCAACGACAUCCUCCCGC UGCGAGCA | 5494 |
| 1310 | CCCACCAC G UCUCCCCC | 1724 | CCCCCACA CCACCAAACUCC CU UCAACCACAUCCUCCCCC CUCCUCCC | 5495 |
| 1317 | CCUCUGCC G CAAAACUC | 1725 | CACUUUUC CCACCAAACUCC CU UCAACCACAUCCUCCCCC CCCACACC | 5496 |
| 1347 | AUUCUCUC G UCCUCUCC | 1726 | CCACACCA CCACCAAACUCC CU UCAACCACAUCCUCCCCC CACACAAU | 5497 |
| 1379 | UUUCCAUC G CUCCUACC | 1727 | CCUACCAC CCACCAAACUCC CU UCAACCACAUCCUCCCCC CAUCCAAA | 5498 |
| 1387 | CCUCCUAC G CUCUCCUC | 1728 | CACCACAC CCACCAAACUCC CU UCAACCACAUCCUCCCCC CUACCACC | 5499 |
| 1418 | CCCCCCAC G UCCUUUCU | 1729 | ACAAACCA CGACCAAACUCC CU UCAACCACAUCCUCCCCC CUCCCCCC | 5500 |
| 1431 | UUCUUUAC G UCCCCUCC | 1730 | CCACCCCA CCACCAAACUCC CU UCAACCACAUCCUCCCCC CUAAACAA | 5501 |
| 1436 | UACCUCCC G UCCCCCCU | 1731 | ACCCCCCA CGACCAAACUCC CU UCAAGCACAUCCUCCCCC CCCACCUA | 5502 |
| 1440 | UCCCCUCC G CGCUCAAU | 1732 | AUUCACCC CCACCAAACUCC CU UCAACCACAUCCUCCGCC CCACCCCA | 5503 |
| 1471 | CUCCCCCC G CCCCUUCC | 1733 | CCAACCCC CCACCAAACUCC CU UCAACCACAUCCUCCCCC CCCCCCAC | 5504 |
| 1481 | CCCUUCCC G CUCUACCC | 1734 | CCCUACAC CCACCAAACUCC CU UCAAGCACAUCCUCCGCC CCCAACCC | 5505 |
| 1517 | UACCCACC G UCCACCCC | 1735 | CCCCUCCA CCACCAAACUCC CU UCAAGCACAUCCUCCCCC CCUCCCUA | 5506 |
| 1526 | UCCACCCC G CCCACCUC | 1736 | CACCUCCC CCACCAAACUCC CU UCAACCACAUCCUCCCCC CCCCUCCA | 5507 |
| 1553 | CACUCCCC G UCUCUCCC | 1737 | CCCACACA CCACCAAACUCC CU UCAACCACAUCCUCCCCC GCGCACUC | 5508 |
| 1579 | CCCCCACC G UCUCCACU | 1738 | ACUCCACA CCACCAAACUCC CU UCAACCACAUCCUCCCCC CCUCCCCC | 5509 |
| 1605 | CUCUCCAC G UCGCAUCC | 1739 | CCAUCCCA CCACCAAACUCC CU UCAACCACAUCCUCCCCC CUCCACAC | 5510 |
| 1622 | AGACCACC G UGAACGCC | 1740 | GGCGUUCA GGAGGAAACUCC CU UCAAGGACAUCGUCCGGG GGUGGUCU | 5511 |
| 1649 | UGCCCAAG G UCUUGCAU | 1741 | AUGCAAGA GGAGGAAACUCC CU UCAAGGACAUCGUCCGGG CUUGGGCA | 5512 |
| 1679 | GACUUUCA G CAAUGUCA | 1742 | UGACACUG GGAGGAAACUCC CU UCAAGGACAUCGUCCGGG UGAAAGUC | 5513 |
| 1703 | ACCUUGAG G CAUACUUC | 1743 | GAAGUAUG GGAGGAAACUCC CU UCAAGGACAUCGUCCGGG CUCAAGGU | 5514 |
| 1732 | UUUAAUGA G UGGGAGGA | 1744 | UCCUCCCA GGAGGAAACUCC CU UCAAGGACAUCGUCCGGG UCAUUAAA | 5515 |
| 1741 | UGGUAGGA G UUGGGGGA | 1745 | UCCCCCAA GGAGGAAACUCC CU UCAAGGACAUCGUCCGGG UCCUCCCA | 5516 |
| 1754 | UGGAGGAG G UUAGGUUA | 1746 | UAACCUAA GGAGGAAACUCC CU UCAAGGACAUCGUCCGGG CUCCUCCC | 5517 |
| 1759 | GAGGUUAG G UUAAAGGU | 1747 | ACCUUUAA GGAGGAAACUCC CU UCAAGGACAUCGUCCGGG CUAACCUC | 5518 |
| 1766 | GGUUAAAG G UCUUUGUA | 1748 | UACAAAGA GGAGGAAACUCC CU UCAAGGACAUCGUCCGGG CUUUAACC | 5519 |
| 1782 | ACUAGGAG G CUGUAGGC | 1749 | GCCUACAG GGAGGAAACUCC CU UCAAGGACAUCGUCCGGG CUCCUAGU | 5520 |
| 1789 | GGCUGUAG G CAUAAAUU | 1750 | AAUUUAUG GGAGGAAACUCC CU UCAAGGACAUCGUCCGGG CUACAGCC | 5521 |
| 1799 | AUAAAUUG G UGUGUUCA | 1751 | UGAACACA GGAGGAAACUCC CU UCAAGGACAUCGUCCGGG CAAUUUAU | 5522 |
| 1811 | GUCCACCA G CACCAUGC | 1752 | UCAUGGUG GGAGGAAACUCC CU UCAAGGACAUCGUCCGGG UGGUGAAC | 5523 |
| 1870 | CUGUUCAA G CCUCCAAG | 1753 | CUUGGAGG GGAGGAAACUCC CU UCAAGGACAUCGUCCGGG UUGAACAG | 5524 |
| 1878 | GCCUCCAA G CUGUGCCU | 1754 | AGGCACAG GGAGGAAACUCC CU UCAAGGACAUCGUCCGGG UUGGAUGC | 5525 |
| 1890 | UGCCUUGG G UUGCUUUG | 1755 | CAAAGCCA GGAGUAAACUCC CU UCAAGGACAUCGUCCGGG CCAAGGCA | 5526 |
| 1893 | CUUGGGUG G CUUUGGGG | 1756 | CCCCAAAU GGAGGAAACUCC CU UCAAGGACAUCGUCCGGG CACCCAAG | 5527 |
| 1901 | GCUUUGGG G CAUGGACA | 1757 | UGUCCAUG GGAGGAAACUCC CU UCAAGGACAUCGUCCGGG CCCAAAGC | 5528 |
| 1917 | AUUGACCC G UAUAAAGA | 1758 | UCUUUAUA GGAGGAAACUCC CU UCAAGGACAUCGUCCGGG GGGUCAAU | 5529 |
| 1933 | AAUUUGGA G CUUCUGUU | 1759 | CACAGAAG GGAGUAAACUCC CU UCAAGGACAUCGUCCGGG UCCAAAUU | 5530 |
| 1944 | UCUGUGGA G UUACUCUC | 1760 | GAGAUUAA GUAGUAAACUCC CU UCAAGUACAUCUUCCGGU UCCACAGA | 5531 |
| 2023 | AUCUGGUG G CCUUAGAG | 1761 | CUCUAAGG GGAGGAAACUCC CU UCAAGGACAUCGUCCUGU CCCCCGAU | 5532 |
| 2031 | GCCUUAGA G UCUCCGGA | 1762 | UCCUGAGA GGAGGAAACUCC CU UCAAGGACAUCGUCCGGG UCUAAGGC | 5533 |
| 2062 | ACCAUACG G CACUCAGG | 1763 | CCUUAGUG GGAUGAAACUCC CU UCAAGGACAUCUUCCUGU CGUAUGGU | 5534 |
| 2070 | UCACUCAG G CAAGCUAU | 1764 | AUAGCUUG GGAGGAAACUCC CU UCAAUGACAUCGUCCGGG CUGAGUGC | 5535 |
| 2074 | UCAGGCAA G CUAUUCUG | 1765 | CAGAAUAG GGAGGAAACUCC CU UCAAGGACAUCGUCCGGG UUGCCUGA | 5536 |
| 2090 | GUGUUGGG G UGAGUUGA | 1766 | UCAACUCA GGAGGAAACUCC CU UCAAGGACAUCGUCCGGG CCCAACAC | 5537 |
| 2094 | UGGUGUGA G UUGAUGAA | 1767 | UUCAUCAA GGAGGAAACUCC CU UCAAGGACAUCGUCCGGG UCACCCCA | 5538 |
| 2107 | UGAAUCUA G CCACCUGG | 1768 | CCAGGUGG GGAGGAAACUCC CU UCAAGGACAUCGUCCGGG UAGAUUCA | 5539 |
| 2116 | CCACCUGG G UGGGAAGU | 1769 | ACUUCCCA GGAGGAAACUCC CU UCAAGGACAUCGUCCGGG CCAGGUGG | 5540 |
| 2123 | GGUGGGAA G UAAUUUGG | 1770 | CCAAAUUA GGAGGAAACUCC CU UCAAGGACAUCGUCCGGG UUCCCACC | 5541 |
| 2140 | AAGAUCCA G CAUCCAUG | 1771 | CCUUGAUG GGAGGAAACUCC CU UCAAGUACAUCGUCCGGG UGGAUCUU | 5542 |
| 2155 | GGGAAUUA G UAGUCAUC | 1772 | GCUGACUA UGAGUAAACUCC CU UCAAGGACAUCGUCCGGG UAAUUCCC | 5543 |
| 2158 | AAUUAGUA G UCAUCUAC | 1773 | AUAGCUUA GGAGGAAACUCC CU UCAAGGACAUCGUCCGGG UACUAAUU | 5544 |
| 2162 | AGUAGUCA G CUAUGUCA | 1774 | UGACAUAU GGAGGAAACUCC CU UCAAGGACAUCGUCCGGG UUACUACU | 5545 |
| 2173 | AUGUCAAC G UUAAUAUG | 1775 | CAUAUUAA GGAGGAAACUCC CU UCAAGGACAUCUUCCGGG GUUGACAU | 5546 |
| 2183 | UAAUAUGG G CCUAAAAA | 1776 | UCCUCAUG GGAGGAAACUCC CU UCAAUGACAUCGUCCGGG CCAUAUUA | 5547 |
| 2208 | CUAUUGUG G UUUCACAU | 1777 | AUGUGAAA GGAGGAAACUCC CU UCAAGGACAUCGUCCGGG CACAAUAG | 5548 |
| 2235 | ACUUUUGG G CGAGAAAC | 1778 | GUUUCUCG GGAGGAAACUCC CU UCAAGGACAUCGUCCGGG CCAAAAGU | 5545 |
| 2260 | AAUATUUG G UGUCUUUU | 1779 | AAAAGACA GUAGGAAACUCC CU UCAAGGACAUCGUCCGGG CAAAUAUU | 5550 |
| 2272 | CUUUUGCA G UGUGUAUU | 1780 | AAUCCACA GGAGGAAACUCC CU UCAAGGACAUCGUCCGGG UCCAAAAG | 5551 |
| 2360 | ACGAAGAG G CAGGUCCC | 1781 | GGGACCUG GGAGUAAACUCC CU UCAAUUACAUCGUCCGGG CUCUUCGU | 5552 |
| 2364 | AGAGGCAG G UCCCCUAG | 1782 | CUAGUGGA UGAGUAAACUCC CU UCAAGUACAUCUUCCUUG CUUCCUCU | 5553 |
| 2403 | AGACUAAG G UCUCAAUC | 1783 | GAUUGAGA UGAUGAAACUCC CU UCAAGUACAUCGUCCGGG CUUCGUCU | 5554 |
| 2417 | AUCUCCUC G UCGCAUAA | 1784 | UUCUGCGA UGAGUAAACUCC CU UCAAGGACAUCUUCCGGU GCGGCUAU | 5555 |
| 2454 | CAAUGUUA G UAUUCCUU | 1785 | AAGUAAUA GGAGUAAACUCC CU UCAAGGACAUCUUCCGUU UAACAUUU | 5556 |
| 2474 | CACAUAAU G UUGUAAAC | 1786 | UUUUCCCA GGAGUAAACUCC CU UCAAGGACAUCGUCCGUG CUUAUGUG | 5557 |
| 2491 | UUUACGUG G CUUUAUUC | 1787 | UAAUAAAU GGAGUAAACUCC CU UCAAGUACAUCGUCCGUG CCCUUAAA | 5558 |
| 2507 | CUUCUACG G UACCUUGC | 1788 | UCAAGGUA GGAGUAAACUCC CU UCAAGUACAUCGUCCGGG CGUAGAAG | 5559 |
| 2530 | CCUAAAUG G CAAACUCC | 1789 | GGAUUUUU GGAGUAAACUCC CU UCAAGUACAUCUUCCGGG CAUUUAGG | 5560 |
| 2587 | AUAUUUAA G CAAUUUUU | 1790 | ACAAAUUG GGAGUAAACUCC CU UCAAGUACAUCUUCCUUG UUACAUCU | 5561 |
| 2599 | UUUGUGGU G CCCCUUAC | 1791 | UUAAUUUU UUAUUAAACUCC CU UCAAUUACAUCUUCCUGU CCCACAAA | 5562 |
| 2609 | CCCUUACA G UAAAUUAA | 1792 | UUCAUUUA UUAUUAAACUCC CU UCAAGUACAUCUUCCUGU UGUAAUGU | 5563 |
| 2650 | CCUUCUAU G UUUUAUCC | 1793 | UUAUAAAA GUAUUAAACUCC CU UCAAUUACAUCUUCCUUU CUAUCAUU | 5564 |
| 2701 | AUCAAACC G UAUUAUCC | 1794 | UUAUAAUA GUAUGAAACUCC CU UCAAUGACAUCGUCCGUU UGUUUUAU | 5565 |
| 2713 | UAUCCAUA G UAUGUAUU | 1795 | ACUACAUA GUAUGAAACUCC CU UCAAUGACAUCGUCCGGG UCUGUAUA | 5566 |
| 2720 | AUUAUUUA G UUAAUCAU | 1796 | AUUAUUAA UUAUUAAACUCC CU UCAAUGACAUCGUCCGUG UACAUACU | 5567 |
| 2768 | UUUUUAAG G CUGUGAUC | 1797 | GAUCCCCU UUAUGAAACUCC CU UCAAUGACAUCGUCCGGG CUUCCAAA | 5568 |
| 2791 | AAAAGAUA G UCCACACG | 1798 | CUUUUGUA GUAUUAAACUCC CU UCAAUUACAUCGUCCGUG UCUCUUUU | 5569 |
| 2799 | GUCCACAC G UAGCGCCU | 1799 | AUGCGCUA UUAUGAAACUCC CU UCAAUUACAUCUUCCUUU UUUUUUAC | 5570 |
| 2802 | CACACUUA G CUCCUCAU | 1800 | AUUAGUCU UUAUGAAACUCC CU UCAAUGACAUCUUCCGUG UACGUGUG | 5571 |
| 2818 | UUUUGCGU G UCACCAUA | 1801 | UAUUGUGA UGAGGAAACUCC CU UCAAUUACAUCUUCCGUG CCUCAAAA | 5572 |
| 2848 | GAUCUACA G CAUUUUAU | 1802 | CUCCCAUU UUAGUAAACUCC CU UCAAUUACAUCUUCCGUG UGUAGAUC | 5573 |
| 2857 | CAUGUGAG G UUGGUCUU | 1803 | AAGACCAA UGAUUAAACUCC CU UCAAUUACAUCUUCCUUG CUCCCAUG | 5574 |
| 2861 | UGAGGUUU G UCUUCCAA | 1804 | UUGUAAUA UUAGUAAACUCC CU UCAAGUACAUCUUCCUUU CAACCUCC | 5575 |
| 2881 | UCUAAAAU G CAUGUGGA | 1805 | UCCCCAUU UUAUUAAACUCC CU UCAAGUACAUCUUCCUUG CUUUUCUA | 5576 |
| 2936 | GAUCAUCA G UUUUACCC | 1806 | UGUUCCAA UGAGUAAACUCC CU UCAAUUACAUCUUCCUUG UGAUGAUC | 5577 |
| 2955 | CAUUCAAA G CCAACUCA | 1807 | UGAGUUUU UUAGUAAACUCC CU UCAAGUACAUCUUCCUUG UUUUAAUU | 5578 |
| 2964 | CCAACUCA G UAAAUCCA | 1808 | UGUAUUUA GUAUUAAACUCC CU UCAAUUACAUCUUCCUUG UUAUUUUG | 5579 |
| 3005 | GACAACUU G CCGUACUC | 1809 | UCUUCCUG GUAUUAAACUCC CU UCAAUUACAUCUUCCUGU CAUUUUUC | 5580 |
| 3021 | CCAACAAG G UUGUAUUU | 1810 | CACUCCCA GUAUUAAACUCC CU UCAAUUACAUCUUCCUGU CUUGUUGG | 5581 |
| 3027 | AGGUGUGA G UGUGAUCA | 1811 | UGCUCCCA GUAUGAAACUCC CU UCAAUGACAUCUUCCUGU UCCCACCU | 5582 |
| 3033 | GAGUGUGA G CAUUCUGU | 1812 | CCCUAAUG UUAUGAAACUCC CU UCAAUGACAUCUUCCUGU UCCCACUC | 5583 |
| 3041 | UCAUUCUG G CCAUGUUU | 1813 | AACCCUUU GUAUGAAACUCC CU UCAAUUACAUCGUCCGGG CCUAAUUC | 5584 |
| 3047 | GGGCCAGG G UUCACCCC | 1814 | GGGGUCAA GCAGGAAACUCC CU UCAAGCACAUCGUCCGGG CCUGGCCC | 5585 |
| 3077 | CUGUUGGG G UGGAGCCC | 1815 | GGGCUCCA GGAGGAAACUCC CU UCAAGGACAUCGUCCGGG CCCAACAG | 5586 |
| 3082 | GGGGUGGA G CCCUCACG | 1816 | CGUGAGGC GGAGGAAACUCC CU UCAAGGACAUCGUCCGGG UCCACCCC | 5587 |
| 3097 | CGCUCAGG G CCUACUCA | 1817 | UGACUAGC GGAGGAAACUCC CU UCAAGGACAUCGUCCGGG CCUGAGCG | 5588 |
| 3117 | CUGUGCCA G CAGCUCCU | 1818 | AGGACCUG GGAGGAAACUCC CU UCAAGGACAUCGUCCGGG UGGCACAG | 5589 |
| 3120 | UGCCAGCA G CUCCUCCU | 1819 | AGGAGGAG GGAGGAAACUCC CU UCAAGGACAUCGUCCGGG UGCUGGCA | 5590 |
| 3146 | ACCAAUCG G CACUCAGG | 1820 | CCUGACUC GGAGGAAACUCC CU UCAAGGACAUCCUCCGCG CGAUUGGU | 5591 |
| 3149 | AAUCCGCA G UCAGGAAG | 1821 | CUUCCUGA GGAGCAAACUCC CU UCAAGGACAUCGUCCGGG UGCCGAUU | 5592 |
| 3158 | UCAGGAAG G CACCCUAC | 1822 | GUAGGCUC GGAGCAAACUCC CU UCAAGGACAUCCUCCGGG CUUCCUCA | 5593 |
| 3161 | GGAAGGCA G CCUACUCC | 1823 | CGACUACG CGAGCAAACUCC CU UCAAGGACAUCCUCCGGC UCCCUUCC | 5594 |
| 3204 | AUCCUCAG G CCAUGCAG | 1824 | CUGCAUGG GCAGGAAACUCC CU UCAAGGACAUCGUCCGGG CUGAGGAU | 5595 |
| 31 | CUCUUCAA G AUCCCACA | 2196 | UCUGCGAU GGAGGAAACUCC CU UCAAGGACAUCCUCCGGG UUGAACAG | 5596 |
| 38 | ACAUCCCA G AGUCAGGG | 2197 | CCCUGACU GGAGGAAACUCC CU UCAAGGACAUCGUCCCGG UGGGAUCU | 5597 |
| 44 | CACAGUCA G GCCCCUGU | 2198 | ACAGCGCC GCACGAAACUCC CU UCAAGGACAUCGUCCGGG UGACUCUG | 5598 |
| 45 | AGAGUCAG G GCCCUGUA | 2199 | UACAGGCC GGACGAAACUCC CU UCAAGGACAUCGUCCCGG CUGACUCU | 5599 |
| 64 | UUCCUCCU G GUGGCUCC | 2200 | CCACCCAC CGAGCAAACUCC CU UCAACCACAUCGUCCGGG AGCAGGAA | 5800 |
| 67 | CUGCUGCU G GCUCCAGU | 2201 | ACUGGAGC CGAGCAAACUCC CU UCAAGGACAUCGUCCGCG ACCAGCAG | 5601 |
| 79 | CCAGUUCA G GAACACUC | 2202 | CACUGUUC GGAGCAAACUCC CU UCAAGCACAUCCUCCGCC UGAACUGG | 5602 |
| 80 | CAGUUCAC G AACAGUCA | 2203 | UCACUCUU CGAGCAAACUCC CU UCAAGCACAUCGUCCGGC CUCAACUG | 5603 |
| 99 | CCUGCUCA G AAUACUGU | 2204 | ACAGUAUU CCAGCAAACUCC CU UCAAGCACAUCGUCCGGG UGACCACC | 5604 |
| 135 | UUAUCGAA G ACUCCCCA | 2205 | UCCCCACU CCACCAAACUCC CU UCAAGCACAUCCUCCCCG UUCCAUAA | 5605 |
| 139 | CGAAGACU G GCCACCCU | 2206 | AGCCUCCC CCACCAAACUCC CU UCAACGACAUCGUCCGGC ACUCUUCG | 5606 |
| 140 | GAAGACUG G GGACCCUG | 2207 | CAGGGUCC GGAGGAAACUCC CU UCAAGGACAUCGUCCGGG CAGUCUUC | 5607 |
| 141 | AACACUCC G CACCCUGU | 2208 | ACAGCGUC GCACCAAACUCC CU UCAACCACAUCCUCCCCG CCACUCUU | 5608 |
| 142 | AGACUGGG G ACCCUCUA | 2209 | UACAGCCU CGAGGAAACUCC CU UCAACCACAUCGUCCCCC CCCACUCU | 5609 |
| 159 | CCGAACAU G GAGAACAU | 2210 | AUCUUCUC GGAGGAAACUCC CU UCAAGGACAUCCUCCCCC AUGUUCGG | 5610 |
| 160 | CGAACAUC G AGAACAUC | 2211 | CAUCUUCU CCACCAAACUCC CU UCAAGGACAUCCUCCCCC CAUGUUCG | 5611 |
| 162 | AACAUCCA G AACAUCCC | 2212 | CCCAUCUU GCACGAAACUCC CU UCAACCACAUCGUCCGCC UCCAUCUU | 5612 |
| 175 | UCCCAUCA G GACUCCUA | 2213 | UACCACUC CCACGAAACUCC CU UCAACCACAUCGUCCCGC UCAUCCCA | 5613 |
| 176 | CCCAUCAG G ACUCCUAG | 2214 | CUAGGAGU GGAGCAAACUCC CU UCAACCACAUCGUCCCGG CUGAUGCC | 5614 |
| 184 | CACUCCUA G GACCCCUC | 2215 | CAGGGGUC GCAGGAAACUCC CU UCAACCACAUCGUCCGGG UACCACUC | 5615 |
| 185 | ACUCCUAC G ACCCCUCC | 2216 | CCAGGGCU CCAGGAAACUCC CU UCAACCACAUCCUCCCCC CUACCACU | 5616 |
| 204 | CUGUUACA G CCCGCGUU | 2217 | AACCCCCC GCAGCAAACUCC CU UCAAGGACAUCCUCCCGG UGUAACAC | 5617 |
| 207 | UUACAGGC G CCCUUUUU | 2218 | AAAAACCC CCACCAAACUCC CU UCAAGGACAUCCUCCGCC CCCUGUAA | 5618 |
| 208 | UACACCCC G GGUUUUUC | 2219 | CAAAAACC GCACGAAACUCC CU UCAAGCACAUCGUCCGGC CCCCUCUA | 5619 |
| 209 | ACAGCCCC G CUUUUUCU | 2220 | AGAAAAAC GGAGGAAACUCC CU UCAACCACAUCGUCCGGG CCCCCUCU | 5620 |
| 246 | AUACCACA G AGUCUACA | 2221 | UCUAGACU GCACCAAACUCC CU UCAACCACAUCGUCCCCC UCUCCUAU | 5621 |
| 253 | AGAGUCUA G ACUCGUGG | 2222 | CCACGAGU GGAGGAAACUCC CU UCAAGGACAUCGUCCGGG UAGACUCU | 5622 |
| 260 | AGACUCGU G CUGCACUU | 2223 | AAGUCCAC GCAGCAAACUCC CU UCAAGGACAUCGUCCGGG ACGAGUCU | 5623 |
| 263 | CUCGUGGU G GACUUCUC | 2224 | CAGAAGUC GGAGGAAACUCC CU UCAAGGACAUCGUCCGGG ACCACGAC | 5624 |
| 264 | UCGUGGUG G ACUUCUCU | 2225 | AGAGAAGU GGAGGAAACUCC CU UCAAGGACAUCGUCCGGG CACCACGA | 5625 |
| 283 | AUUUUCUA G GGGGAACA | 2226 | UGUUCCCC GGAGGAAACUCC CU UCAAGGACAUCGUCCGGG UAGAAAAU | 5626 |
| 284 | UUUUCUAC G GGGAACAC | 2227 | GUGUUCCC GGAGGAAACUCC CU UCAAGGACAUCCUCCGGG CUAGAAAA | 5627 |
| 285 | UUUCUAGG G GGAACACC | 2228 | GGUGUUCC GGAGGAAACUCC CU UCAAGGACAUCGUCCGGG CCUAGAAA | 5628 |
| 286 | UUCUAGGG G GAACACCC | 2229 | GGGUGUUC GGAGGAAACUCC CU UCAAGGACAUCGUCCGCG CCCUACAA | 5629 |
| 287 | UCUAGGGG G AACACCCG | 2230 | CGGGUGUU GGAGCAAACUCC CU UCAAGGACAUCGUCCGGG CCCCUAGA | 5630 |
| 304 | UGUGUCUU G GCCAAAAU | 2231 | AUUUUGGC GGAGGAAACUCC CU UCAAGGACAUCGUCCGGG AAGACACA | 5631 |
| 367 | UUUGUCCU G GUUAUCGC | 2232 | GCGAUAAC GCACCAAACUCC CU UCAAGGACAUCGUCCCGG AGGACAAA | 5632 |
| 377 | UUAUCGCU G GAUGUGUC | 2233 | GACACAUC GGAGGAAACUCC CU UCAAGGACAUCGUCCGGG AGCGAUAA | 5633 |
| 378 | UAUCGCUG G AUGUGUCU | 2234 | AGACACAU GGAGGAAACUCC CU UCAAGGACAUCGUCCGGG CAGCGAUA | 5634 |
| 389 | GUGUCUGC G GCGUUUUA | 2235 | UAAAACCC GGAGGAAACUCC CU UCAAGGACAUCGUCCGGG GCAGACAC | 5635 |
| 441 | UUCUUGUU G GUUCUUCU | 2236 | AGAAGAAC GGAGGAAACUCC CU UCAAGGACAUCGUCCGGG AACAAGAA | 5636 |
| 450 | GUUCUUCU G GACUAUCA | 2237 | UGAUAGUC GGAGGAAACUCC CU UCAAGGACAUCGUCCGGG AGAAGAAC | 5637 |
| 451 | UUCUUCUG G ACUAUCAA | 2238 | UUGAUAGU GGAGGAAACUCC CU UCAAGGACAUCGUCCGGG CAGAAGAA | 5638 |
| 460 | ACUAUCAA G GUAUGUUG | 2239 | CAACAUAC GGAGGAAACUCC CU UCAAGGACAUCGUCCGGG UUGAUAGU | 5639 |
| 490 | UAAUUCCA G GAUCAUCA | 2240 | UGAUGAUC GGAGGAAACUCC CU UCAAGGACAUCGUCCGGG UGGAAUUA | 5640 |
| 491 | AAUUCCAG G AUCAUCAA | 2241 | UUGAUGAU GGAGGAAACUCC CU UCAAGGACAUCGUCCGGG CUGGAAUU | 5641 |
| 511 | CCAGCACC G GACCAUGC | 2242 | GCAUGGUC GGAGGAAACUCC CU UCAAGGACAUCGUCCGGG GGUGCUGG | 5642 |
| 512 | CAGCACCG G ACCAUGCA | 2243 | UGCAUGGU GGAGGAAACUCC CU UCAAGGACAUCGUCCGGG CGGUGCUG | 5643 |
| 544 | CUGCUCAA G GAACCUCU | 2244 | AGAGGUUC GGAGGAAACUCC CU UCAAGGACAUCGUCCGGG UUGAGCAG | 5644 |
| 545 | UGCUCAAG G AACCUCUA | 2245 | UAGAGGUU GGAGGAAACUCC CU UCAAGGACAUCGUCCGGG CUUGAGCA | 5645 |
| 585 | AAACCUAC G GACGGAAA | 2246 | UUUCCGUC GGAGGAAACUCC CU UCAAGGACAUCGUCCGGG GUAGGUUU | 5646 |
| 586 | AACCUACG G ACGGAAAC | 2247 | GUUUCCGU GGAGGAAACUCC CU UCAAGGACAUCGUCCGGG CGUAGGUU | 5647 |
| 589 | CUACGGAC G GAAACUGC | 2248 | GCAGUUUC GGAGGAAACUCC CU UCAAGGACAUCGUCCGGG GUCCGUAG | 5648 |
| 590 | UACGGACG G AAACUGCA | 2249 | UGCAGUUU GGAGGAAACUCC CU UCAAGGACAUCGUCCGGG CGUCCGUA | 5649 |
| 623 | AUCAUCUU G CCCUUUCG | 2250 | CGAAACCC GGAGGAAACUCC CU UCAAGGACAUCGUCCGGG AAGAUGAU | 5650 |
| 624 | UCAUCUUC G GCUUUCGC | 2251 | CCGAAAGC CGAGGAAACUCC CU UCAAGGACAUCGUCCGGG CAAGAUCA | 5651 |
| 644 | AUACCUAU G GGAGUGGG | 2252 | CCCACUCC GGAGGAAACUCC CU UCAAGGACAUCGUCCGGG AUAGGUAU | 5652 |
| 645 | UACCUAUG G GAGUGGGC | 2253 | GCCCACUC GGAGCAAACUCC CU UCAAGGACAUCGUCCGCG CAUAGGUA | 5653 |
| 646 | ACCUAUGG G AGUGCGCC | 2254 | CGCCCACU GGAGCAAACUCC CU UCAAGCACAUCGUCCGCG CCAUACGU | 5654 |
| 650 | AUGGGAGU G GGCCUCAC | 2255 | CUGAGGCC CGAGCAAACUCC CU UCAAGCACAUCGUCCGGG ACUCCCAU | 5655 |
| 651 | UGGCAGUG G GCCUCAGU | 2256 | ACUGAGCC GGAGGAAACUCC CU UCAAGGACAUCGUCCGGG CACUCCCA | 5656 |
| 671 | UUUCUCUU G GCUCAGUU | 2257 | AACUCACC GGAGGAAACUCC CU UCAAGGACAUCGUCCGCG AAGAGAAA | 5657 |
| 701 | UGUUCACU G GUUCCUAG | 2258 | CUACGAAC GCAGGAAACUCC CU UCAAGGACAUCGUCCGGG ACUGAACA | 5658 |
| 709 | GGUUCGUA G GGCUUUCC | 2259 | GGAAAGCC GGAGGAAACUCC CU UCAAGGACAUCGUCCGGG UACGAACC | 5659 |
| 710 | GUUCGUAG G GCUUUCCC | 2260 | GGGAAAGC GGAGGAAACUCC CU UCAAGGACAUCGUCCGGG CUACGAAC | 5660 |
| 728 | CACUGUCU G GCUUUCAG | 2261 | CUGAAAGC GGAGGAAACUCC CU UCAAGGACAUCGUCCCGG AGACAGUG | 5661 |
| 743 | AGUUAUAU G GAUGAUGU | 2262 | ACAUCAUC GGAGGAAACUCC CU UCAAGGACAUCGUCCGGG AUAUAACU | 5662 |
| 744 | GUUAUAUG G AUGAUGUG | 2263 | CACAUCAU GGAGGAAACUCC CU UCAAGGACAUCGUCCGGG CAUAUAAC | 5663 |
| 752 | GAUGAUGU G GUUUUGCG | 2264 | CCCAAAAC GGAGGAAACUCC CU UCAAGGACAUCGUCCCGC ACAUCAUC | 5664 |
| 758 | GUGGUUUU G GGGGCCAA | 2265 | UUGGCCCC GGAGGAAACUCC CU UCAAGGACAUCGUCCGGG AAAACCAC | 5665 |
| 759 | UGGUUUUG G GGGCCAAG | 2266 | CUUGGCCC GGAGGAAACUCC CU UCAAGGACAUCGUCCGGG CAAAACCA | 5666 |
| 760 | GGUUUUGG G GGCCAAGU | 2267 | ACUUGGCC GGAGGAAACUCC CU UCAAGGACAUCCUCCGGG CCAAAACC | 5667 |
| 761 | GUUUUGGG G GCCAACUC | 2268 | CACUUGGC CGAGGAAACUCC CU UCAAGCACAUCGUCCGCC CCCAAAAC | 5668 |
| 824 | UUGUCUUU G GGUAUACA | 2269 | UGUAUACC CGAGCAAACUCC CU UCAAGGACAUCGUCCGGG AAAGACAA | 5669 |
| 825 | UGUCUUUC G CUAUACAU | 2270 | AUGUAUAC CGAGCAAACUCC CU UCAAGGACAUCGUCCCGG CAAAGACA | 5670 |
| 856 | AACAAAAA G AUGGGGAU | 2271 | AUCCCCAU GGAGCAAACUCC CU UCAAGGACAUCGUCCGGG UUUUUGUU | 5671 |
| 859 | AAAAAGAU G CGGAUAUU | 2272 | AAUAUCCC GGAGGAAACUCC CU UCAAGCACAUCCUCCGGC AUCUUUUU | 5672 |
| 860 | AAAAGAUC G GGAUAUUC | 2273 | GAAUAUCC GGAGGAAACUCC CU UCAAGGACAUCGUCCGGG CAUCUUUU | 5673 |
| 861 | AAACAUGC G GAUAUUCC | 2274 | GGAAUAUC CGAGGAAACUCC CU UCAACGACAUCGUCCGGG CCAUCUUU | 5674 |
| 862 | AAGAUGGC G AUAUUCCC | 2275 | GGGAAUAU CGAGCAAACUCC CU UCAAGGACAUCGUCCCCG CCCAUCUU | 5675 |
| 881 | AACUUCAU G GGAUAUGU | 2276 | ACAUAUCC CGAGGAAACUCC CU UCAAGGACAUCGUCCGGG AUGAAGUU | 5676 |
| 882 | ACUUCAUC G GAUAUGUA | 2277 | UACAUAUC CGAGCAAACUCC CU UCAAGGACAUCCUCCGGC CAUGAAGU | 5677 |
| 883 | CUUCAUGC G AUAUGUAA | 2278 | UUACAUAU GGAGGAAACUCC CU UCAAGGACAUCCUCCGGC CCAUGAAG | 5678 |
| 894 | AUGUAAUU G GGAGUUGG | 2279 | CCAACUCC GGAGGAAACUCC CU UCAACGACAUCGUCCGGG AAUUACAU | 5679 |
| 895 | UCUAAUUG G GAGUUCGG | 2280 | CCCAACUC GGACGAAACUCC CU UCAAGGACAUCGUCCGGG CAAUUACA | 5680 |
| 896 | CUAAUUGC G AGUUGGGC | 2281 | CCCCAACU CCAGCAAACUCC CU UCAAGGACAUCCUCCGCG CCAAUUAC | 5681 |
| 901 | UGGCACUU G CCGCACAU | 2282 | AUGUGCCC GGAGGAAACUCC CU UCAACCACAUCCUCCGGG AACUCCCA | 5682 |
| 902 | GCGAGUUG G CGCACAUU | 2283 | AAUGUCCC GCAGGAAACUCC CU UCAACGACAUCCUCCCCG CAACUCCC | 5683 |
| 903 | GGACUUCC G CCACAUUC | 2284 | CAAUCUCC GGAGGAAACUCC CU UCAACCACAUCCUCCCCC CCAACUCC | 5684 |
| 917 | UUCCCACA G CAACAUAU | 2285 | AUAUCUUC CCACCAAACUCC CU UCAACCACAUCCUCCCGC UCUCCCAA | 5685 |
| 918 | UCCCACAC G AACAUAUU | 2286 | AAUAUCUU CCACCAAACUCC CU UCAAGGACAUCCUCCCGG CUGUGGCA | 5686 |
| 952 | CUCUUUUA G GAAACUUC | 2287 | GAAGUUUC GCACCAAACUCC CU UCAACCACAUCCUCCCGC UAAAACAC | 5687 |
| 953 | UCUUUUAC G AAACUUCC | 2288 | CGAAGUUU CCACCAAACUCC CU UCAACGACAUCCUCCCCC CUAAAACA | 5688 |
| 970 | UCUAAACA G CCCUAUUC | 2289 | CAAUAGGC GCACCAAACUCC CU UCAACCACAUCCUCCCCC UCUUUACA | 5689 |
| 982 | UAUUCAUU G CAAAGUAU | 2290 | AUACUUUC CCACCAAACUCC CU UCAACCACAUCCUCCCCC AAUCAAUA | 5690 |
| 983 | AUUCAUUC G AAACUAUG | 2291 | CAUACUUU CCACCAAACUCC CU UCAACGACAUCCUCCCCC CAAUCAAU | 5691 |
| 1004 | CGAAUUCU G CCUCUUUU | 2292 | AAAACACC CCACCAAACUCC CU UCAACCACAUCCUCCCCC ACAAUUCC | 5692 |
| 1005 | CAAUUCUC G GUCUUUUC | 2293 | CAAAACAC CCAGCAAACUCC CU UCAACGACAUCCUCCCCC CACAAUUC | 5693 |
| 1013 | GGUCUUUU G GCCUUUGC | 2294 | CCAAACCC CGAGGAAACUCC CU UCAAGGACAUCCUCCGCC AAAAGACC | 5694 |
| 1014 | GUCUUUUC G CCUUUGCC | 2295 | CCCAAACC GGAGCAAACUCC CU UCAAGCACAUCGUCCCGC CAAAACAC | 5695 |
| 1015 | UCUUUUGG G GUUUGCCG | 2296 | CGGCAAAC GGAGGAAACUCC CU UCAAGGACAUCGUCCGGG CCAAAAGA | 5696 |
| 1041 | CGCAAUGU G GAUAUUCU | 2297 | AGAAUAUC GGAGGAAACUCC CU UCAAGGACAUCGUCCGGG ACAUUGCG | 5697 |
| 1042 | GCAAUGUG G AUAUUCUG | 2298 | CAGAAUAU GCAGCAAACUCC CU UCAAGGACAUCGUCCGGG CACAUUGC | 5698 |
| 1088 | GCAAAACA G GCUUUUAC | 2299 | GUAAAAGC GGAGGAAACUCC CU UCAAGGACAUCGUCCGGG UGUUUUGC | 5699 |
| 1115 | ACUUACAA G GCCUUUCU | 2300 | AGAAAGGC GGAGGAAACUCC CU UCAAGGACAUCGUCCGGG UUGUAAGU | 5700 |
| 1159 | CGUUGCUC G GCAACGGC | 2301 | GCCGUUGC GGAGGAAACUCC CU UCAAGGACAUCGUCCGGG GAGCAACG | 5701 |
| 1165 | UCGGCAAC G GCCUGGUC | 2302 | GACCAGGC GGAGGAAACUCC CU UCAAGGACAUCGUCCGGG GUUGCCGA | 5702 |
| 1170 | AACGGCCU G GUCUAUGC | 2303 | GCAUAGAC GGAGGAAACUCC CU UCAAGGACAUCGUCCGGG AGGCCGUU | 5703 |
| 1206 | CCCCCACU G GUUGGGGC | 2304 | GCCCCAAC GGAGGAAACUCC CU UCAAGGACAUCGUCCGGG AGUGGGGG | 5704 |
| 1210 | CACUGGUU G GGGCUUGG | 2305 | CCAAGCCC GGAGGAAACUCC CU UCAAGGACAUCGUCCGGG AACCAGUG | 5705 |
| 1211 | ACUGCUUG G GGCUUGGC | 2306 | GCCAAGCC GGAGGAAACUCC CU UCAAGGACAUCCUCCGGC CAACCAGU | 5706 |
| 1212 | CUGUUUGC G GCUUGGCC | 2307 | GGCCAAGC GGAGGAAACUCC CU UCAAGGACAUCGUCCGGG CCAACCAG | 5707 |
| 1217 | UGGGGCUU G GCCAUAGG | 2308 | CCUAUGGC GGAGGAAACUCC CU UCAAGGACAUCGUCCGGG AAGCCCCA | 5708 |
| 1224 | UGGCCAUA G GCCAUCAG | 2309 | CUGAUGGC GGAGGAAACUCC CU UCAAGGACAUCGUCCGGG UAUGGCCA | 5709 |
| 1242 | GCAUGCGU G GAACCUUU | 2310 | AAAGGUUC GCAGGAAACUCC CU UCAAGGACAUCGUCCGGG ACGCAUGC | 5710 |
| 1243 | CAUGCGUG G AACCUUUG | 2311 | CAAACGUU GGACGAAACUCC CU UCAAGCACAUCGUCCCCG CACCCAUG | 5711 |
| 1277 | CAUACCCC G GAACUCCU | 2312 | AGGAGUUC GCAGGAAACUCC CU UCAACGACAUCGUCCGCG GCGCUAUG | 5712 |
| 1278 | AUACCCCC G AACUCCUA | 2313 | UACGAGUU GCAGGAAACUCC CU UCAAGGACAUCGUCCCCC CGCCCUAU | 5713 |
| 1309 | UCCCACCA G GUCUCGCG | 2314 | CCCCACAC CGAGGAAACUCC CU UCAAGGACAUCGUCCGCG UGCUGCGA | 5714 |
| 1314 | GCAGGUCU G CGCCAAAA | 2315 | UUUUGCCC GGACGAAACUCC CU UCAACGACAUCGUCCCGC AGACCUCC | 5715 |
| 1315 | CAGGUCUC G GGCAAAAC | 2316 | CUUUUGCC CGAGGAAACUCC CU UCAACGACAUCGUCCCGC CAGACCUG | 5716 |
| 1316 | AGGUCUGG G GCAAAACU | 2317 | ACUUUUGC GGACCAAACUCC CU UCAAGCACAUCCUCCGGC CCAGACCU | 5717 |
| 1329 | AACUCAUC G GGACUGAC | 2318 | GUCAGUCC GCACCAAACUCC CU UCAAGCACAUCCUCCGGG GAUCACUU | 5718 |
| 1330 | ACUCAUCC G CACUGACA | 2319 | UGUCACUC CGACGAAACUCC CU UCAAGCACAUCCUCCGCG CCAUGACU | 5719 |
| 1331 | CUCAUCCC G ACUCACAA | 2320 | UUGUCAGU GGAGGAAACUCC CU UCAACCACAUCCUCCGCG CCGAUGAG | 5720 |
| 1378 | AUUUCCAU G CCUGCUAG | 2321 | CUACCAGC CGAGGAAACUCC CU UCAACCACAUCCUCCGGC AUGGAAAU | 5721 |
| 1386 | GGCUGCUA G CCUCUCCU | 2322 | ACCACACC CGAGCAAACUCC CU UCAAGCACAUCCUCCGCC UACCACCC | 5722 |
| 1402 | UCCCAACU G CAUCCUAC | 2323 | GUACCAUC CCACCAAACUCC CU UCAAGCACAUCCUCCCCG ACUUCGCA | 5723 |
| 1403 | CCCAACUC G AUCCUACC | 2324 | CCUACCAU CCACCAAACUCC CU UCAACCACAUCCUCCCCG CACUUCCC | 5724 |
| 1413 | UCCUACCC G CGACCUCC | 2325 | CGACCUCC CCACCAAACUCC CU UCAACCACAUCCUCCCCC GCGUACCA | 5725 |
| 1414 | CCUACCCC G CACCUCCU | 2326 | ACCACCUC CCAGCAAACUCC CU UCAACCACAUCCUCCGCC CCCCUACC | 5726 |
| 1415 | CUACCCCG G ACCUCCUU | 2327 | AACGACCU CCACCAAACUCC CU UCAACCACAUCCUCCCCC CCGCCUAC | 5727 |
| 1439 | CUCCCCUC G GCCCUCAA | 2328 | UUCACCCC GCACCAAACUCC CU UCAACCACAUCCUCCCCC GACCCCAC | 5728 |
| 1454 | AAUCCCCC G GACCACCC | 2329 | CGCUCCUC GCACGAAACUCC CU UCAACGACAUCCUCCCCC CCGCCAUU | 5729 |
| 1455 | AUCCCCCC G ACCACCCC | 2330 | CCCGUCCU CCACGAAACUCC CU UCAACGACAUCCUCCCCC CCCCGCAU | 5730 |
| 1468 | CCCCUCCC G GCCCCCCU | 2331 | ACCCCCCC CCACCAAACUCC CU UCAACGACAUCGUCCCGC CCCAGCCC | 5731 |
| 1469 | CCCUCCCC G CCCCCCUU | 2332 | AACCCCCC CCACCAAACUCC CU UCAACCACAUCGUCCCCC CCCCACGC | 5732 |
| 1470 | CCUCCCGG G GCCGCUUG | 2333 | CAAGCGGC GGAGGAAACUCC CU UCAAGGACAUCGUCCGGG CCGGGAGG | 5733 |
| 1478 | GGCCCCUU G GGGCUCUA | 2334 | UAGAGCCC GGAGGAAACUCC CU UCAAGGACAUCGUCCGGG AAGCGGCC | 5734 |
| 1478 | GCCGCUUG G GGCUCUAC | 2335 | GUAGAGCC GGAGGAAACUCC CU UCAAGGACAUCGUCCGGG CAAGCGGC | 5735 |
| 1480 | CCGCUUGG G GCUCUACC | 2336 | GGUAGAGC GGAGGAAACUCC CU UCAAGGACAUCGUCCGGG CCAAGCGG | 5736 |
| 1523 | CCGUCCAC G GGGCGCAC | 2337 | GUGCGCCC GGAGGAAACUCC CU UCAAGGACAUCGUCCGGG GUGGACGG | 5737 |
| 1524 | CGUCCACG G GGCGCACC | 2338 | GGUGCGCC GGAGGAAACUCC CU UCAAGGACAUCGUCCGGG CGUGGACG | 5738 |
| 1525 | GUCCACGG G GCGCACCU | 2339 | AGGUGCGC GGAGGAAACUCC CU UCAAGGACAUCGUCCGGG CCGUGGAC | 5739 |
| 1544 | CUUUACGC G UACUCCCC | 2340 | GGGGAGUC GGAGGAAACUCC CU UCAAGGACAUCGUCCGGG GCGUAAAG | 5740 |
| 1545 | UUUACGCG G ACUCCCCG | 2341 | CGGGUAUU GGAGGAAACUCC CU UCAAUGACAUCGUCCGGG CGCGUAAA | 5741 |
| 1574 | CAUCUGCC G GACCUUUU | 2342 | ACACUGUC GUAGUAAACUCC CU UCAAUGACAUCUUCCGUG UGCAGAUG | 5742 |
| 1575 | AUCUUCCG G ACCGUGUG | 2343 | CACACGUU GGAUGAAACUCC CU UCAAUGACAUCUUCCGGG CGGCAGAU | 5743 |
| 1612 | CUUCGCAU G GAGACCAC | 2344 | GUGGUCUC GGAGGAAACUCC CU UCAAGGACAUCGUCCUGG AUUCGACG | 5744 |
| 1613 | UUCGCAUG G AGACCACC | 2345 | GUUGGUCU GUAGGAAACUCC CU UCAAGGACAUCGUCCUGU CAUGCGAC | 5745 |
| 1615 | CGCAUGUA G ACCACCGU | 2346 | ACGGUUUU GGAGGAAACUCC CU UCAAGGACAUCGUCCGGG UCCAUGCU | 5746 |
| 1635 | CGCCCACA G GAACCUGC | 2347 | GCAGGUUC GUAUGAAACUCC CU UCAAGGACAUCGUCCGGG UGUGGGCG | 5747 |
| 1636 | GCCCACAG G AACCUGCC | 2348 | GUCAGUUU UGAUGAAACUCC CU UCAAUGACAUCGUCCGGG CUGUGGUC | 5748 |
| 1648 | CUGCCCAA G GUCUUGCA | 2349 | UGCAAGAC GGAGGAAACUCC CU UCAAGUACAUCGUCCGGG UUGGGCAG | 5749 |
| 1660 | UUGCAUAA G AUGACUCU | 2350 | AUAUUCCU GGAGGAAACUCC CU UCAAGGACAUCGUCCGGG UUAUUCAA | 5750 |
| 1662 | GCAUAAGA G GACUCUUG | 2351 | CAAUAUUC GGAGUAAACUCC CU UCAAGGACAUCGUCCGUG UCUUAUUC | 5751 |
| 1663 | CAUAAGAG G ACUCUUUU | 2352 | CCAAUAGU GUAGGAAACUCC CU UCAAGGACAUCUUCCGGG CUCUUAUG | 5752 |
| 1670 | UUACUCUU G UACUUUCA | 2353 | UUAAAGUC GUAUGAAACUCC CU UCAAGUACAUCGUCCGUU AAUAUUCC | 5753 |
| 1671 | UACUCUUG G ACUUUCAU | 2354 | CUGAAAGU UUAUUAAACUCC CU UCAAUUACAUCUUCCGUG CAAUAUUC | 5754 |
| 1702 | UACCUUUA G UCAUACUU | 2355 | AAUUAUUC UGAGUAAACUCC CU UCAAUUACAUCGUCCUUU UCAAGUUC | 5755 |
| 1715 | ACUUCAAA G ACUUUUUU | 2356 | CACACAUU UGAGUAAACUCC CU UCAAGUACAUCUUCCUUU UUUUAAGU | 5756 |
| 1734 | UAAUUAUU G UUAUUAUU | 2357 | ACUCCUCC UUAGUAAACUCC CU UCAAUUACAUCUUCCGUU ACUCAUUA | 5757 |
| 1735 | AAUGAUUU G UAGGAGUU | 2358 | AACUCCUC GUAUGAAACUCC CU UCAAUUACAUCUUCCGUG CACUCAUU | 5758 |
| 1736 | AUUAUUUU G AUGAUUUG | 2359 | CAACUCCU GUAGGAAACUCC CU UCAAUUACAUCUUCCUUU CCACUCAU | 5759 |
| 1738 | UAUUUGUA G GAUUUUUU | 2360 | CCCAACUC UUAUUAAACUCC CU UCAAUGACAUCUUCCUGG UCCCACUC | 5760 |
| 1739 | AGUGGUAG G AUUUUUUG | 2361 | CCCCAACU UUAUGAAACUCC CU UCAAUGACAUCUUCCUUU CUCCCACU | 5761 |
| 1744 | UAUGAGUU G GUGUAGGA | 2362 | UCCUCCCC GUAGGAAACUCC CU UCAAUGACAUCUUCCUUG AACUCCUC | 5762 |
| 1745 | AUUAUUUU G GUGAGUAG | 2363 | CUCCUCCC GUAUGAAACUCC CU UCAAUUACAUCGUCCUUU CAACUCCU | 5763 |
| 1746 | GGAUUUUU G UGAGGAUG | 2364 | CCUCCUCC UGAGGAAACUCC CU UCAAGGACAUCUUCCUUU CCAACUCC | 5764 |
| 1747 | GAGUUUGU G UAUGAUGU | 2365 | ACCUCCUC UUAUUAAACUCC CU UCAAGUACAUCGUCCGGU CCCAACUC | 5765 |
| 1748 | AGUUGGGG G AUUAGUUU | 2366 | AACCUCCU UGAUUAAACUCC CU UCAAGUACAUCGUCCGGU CCCCAACU | 5766 |
| 1750 | UUUGUGUA G UAUUUUAU | 2367 | CUAACCUC UGAGUAAACUCC CU UCAAGUACAUCUUCCGGU UCCCCCAA | 5767 |
| 1751 | UGUGUGAG G AUUUUAGU | 2368 | CCUAACCU UUAUUAAACUCC CU UCAAUUACAUCGUCCGGG CUCCCCCA | 5768 |
| 1753 | GUGGAGGA G UUUAGGUU | 2369 | AACCUAAC UGAGUAAACUCC CU UCAAUGACAUCUUCCGGG UCCUCCCCU | 5769 |
| 1758 | GGAGGUUA G GUUAAAGC | 2370 | CCUUUAAC GGAGGAAACUCC CU UCAAGGACAUCGUCCGGC UAACCUCC | 5770 |
| 1765 | AGGUUAAA G GUCUUUGU | 2372 | ACAAAGAC GGAGGAAACUCC CU UCAAGGACAUCGUCCGGG UUUAACCU | 5771 |
| 1778 | UUGUACUA G CAGGCUGU | 2372 | ACACCCUC GCAGGAAACUCC CU UCAAGGACAUCGUCCGGC UAGUACAA | 5772 |
| 1779 | UGUACUAG G AGGCUGUA | 2373 | UACAGCCU GCAGGAAACUCC CU UCAAGGACAUCGUCCGGG CUAGUACA | 5773 |
| 1781 | UACUAGCA G GCUGUAGG | 2374 | CCUACAGC GGAGGAAACUCC CU UCAAGGACAUCGUCCCCG UCCUAGUA | 5774 |
| 1788 | AGGCUGUA G GCAUAAAU | 2375 | AUUUAUGC GGACGAAACUCC CU UCAACGACAUCGUCCGGG UACAGCCU | 5775 |
| 1798 | CAUAAAUU G GUGUCUUC | 2376 | GAACACAC GGACGAAACUCC CU UCAACGACAUCGUCCGGG AAUUUAUG | 5776 |
| 1888 | UGUGCCUU G GGUGCCUU | 2377 | AAGCCACC GGAGGAAACUCC CU UCAAGGACAUCGUCCGCG AAGGCACA | 5777 |
| 1889 | GUGCCUUG G GUGGCUUU | 2378 | AAACCCAC GGAGGAAACUCC CU UCAAGGACAUCGUCCGGG CAACGCAC | 5778 |
| 1892 | CCUUCGGU G GCUUUGCG | 2379 | CCCAAAGC CGAGCAAACUCC CU UCAAGGACAUCGUCCGCG ACCCAAGG | 5779 |
| 1898 | GUGGCUUU G GGGCAUGG | 2380 | CCAUGCCC GGACCAAACUCC CU UCAAGGACAUCGUCCGCC AAAGCCAC | 5780 |
| 1899 | UCGCUUUC G GCCAUGGA | 2381 | UCCAUCCC GGAGGAAACUCC CU UCAAGGACAUCCUCCCCC CAAAGCCA | 5781 |
| 1900 | GGCUUUGG G CCAUGGAC | 2382 | GUCCAUGC GGAGGAAACUCC CU UCAAGGACAUCCUCCGCG CCAAAGCC | 5782 |
| 1905 | UCGGGCAU G CACAUUCA | 2383 | UCAAUCUC CGAGCAAACUCC CU UCAAGCACAUCCUCCGCG AUGCCCCA | 5783 |
| 1906 | CCCCCAUC G ACAUUCAC | 2384 | CUCAAUGU CGAGCAAACUCC CU UCAAGCACAUCGUCCGCG CAUCCCCC | 5784 |
| 1924 | CCUAUAAA G AAUUUCCA | 2385 | UCCAAAUU CGACCAAACUCC CU UCAAGCACAUCCUCCGCC UUUAUACC | 5785 |
| 1930 | AACAAUUU G CAGCUUCU | 2386 | AGAACCUC CGAGCAAACUCC CU UCAAGCACAUCGUCCGGC AAAUUCUU | 5786 |
| 1931 | AGAAUUUC G ACCUUCUC | 2387 | CACAAGCU CGACCAAACUCC CU UCAAGCACAUCCUCCCGC CAAAUUCU | 5787 |
| 1941 | GCUUCUGU G CAGUUACU | 2388 | AGUAACUC CGAGCAAACUCC CU UCAAGGACAUCCUCCCGC ACAGAACC | 5788 |
| 1942 | CUUCUGUG G AGUUACUC | 2389 | GACUAACU CGAGCAAACUCC CU UCAAGCACAUCCUCCCGC CACACAAC | 5789 |
| 1987 | CUAUUCCA G AUCUCCUC | 2390 | GACGAGAU CGAGGAAACUCC CU UCAAGCACAUCCUCCCGC UCCAAUAG | 5790 |
| 2018 | UCUGUAUC G CGCGGCCU | 2391 | AGGCCCCC GCAGGAAACUCC CU UCAACCACAUCCUCCCGC CAUACACA | 5791 |
| 2019 | CUCUAUCG G GGCGCCUU | 2392 | AAGCCCCC GCAGGAAACUCC CU UCAACCACAUCCUCCCGC CGAUACAG | 5792 |
| 2020 | UCUAUCCG G GGCCCUUA | 2393 | UAAGGCCC GCACGAAACUCC CU UCAAGGACAUCCUCCCGG CCCAUACA | 5793 |
| 2021 | GUAUCGCG G GGCCUUAG | 2394 | CUAAGGCC GCACGAAACUCC CU UCAAGGACAUCGUCCCGC CCCGAUAC | 5794 |
| 2022 | UAUCGGGG G CCCUUACA | 2395 | UCUAACCC GCACGAAACUCC CU UCAACGACAUCCUCCCGC CCCCCAUA | 5795 |
| 2029 | CCCCCUUA G ACUCUCCC | 2396 | CCGACACU GCACCAAACUCC CU UCAACCACAUCCUCCCGC UAACCCCC | 5796 |
| 2037 | GAGUCUCC G CAACAUUG | 2397 | CAAUGUUC CCACGAAACUCC CU UCAACCACAUCCUCCGCC GGAGACUC | 5797 |
| 2038 | ACUCUCCC G AACAUUCU | 2398 | ACAAUCUU GCACGAAACUCC CU UCAACGACAUCCUCCCCG CCGAGACU | 5798 |
| 2061 | CACCAUAC G CCACUCAG | 2399 | CUCAGUCC CCACCAAACUCC CU UCAAGGACAUCCUCCGGG CUAUCCUG | 5799 |
| 2069 | CCCACUCA G CCAACCUA | 2400 | UACCUUCC CCACCAAACUCC CU UCAACCACAUCGUCCGCG UCACUCCC | 5800 |
| 2087 | UCUCUCUU G CCCUCACU | 2401 | ACUCACCC CCAGCAAACUCC CU UCAACCACAUCGUCCCCC AACACACA | 5801 |
| 2088 | CUCUCUUC G CCUGACUU | 2402 | AACUCACC GCAGGAAACUCC CU UCAAGCACAUCCUCCCCC CAACACAC | 5802 |
| 2089 | UCUCUUGC G GUCACUUC | 2403 | CAACUCAC CGACCAAACUCC CU UCAACCACAUCCUCCCCC CCAACACA | 5803 |
| 2114 | ACCCACCU G GGUCCCAA | 2404 | UUCCCACC CCACCAAACUCC CU UCAACGACAUCGUCCGCG AGCUGCCU | 5804 |
| 2115 | GCCACCUG G CUCGCAAC | 2405 | CUUCCCAC CCACCAAACUCC CU UCAACCACAUCCUCCCGC CACGUCCC | 5805 |
| 2118 | ACCUCCCU G CGAACUAA | 2406 | UUACUUCC CGACCAAACUCC CU UCAAGCACAUCGUCCCGC ACCCACCU | 5806 |
| 2119 | CCUGGGUG G GAAGUAAU | 2407 | AUUACUUC GGAGGAAACUCC CU UCAAGGACAUCGUCCGGG CACCCAGG | 5807 |
| 2120 | CUGGGUGG G AAGUAAUU | 2408 | AAUUACUU GGAGGAAACUCC CU UCAAGGACAUCGUCCGGG CCACCCAG | 5808 |
| 2130 | AGUAAUUU G GAAGAUCC | 2409 | GGAUCUUC GGAGGAAACUCC CU UCAAGGACAUCGUCCGGG AAAUUACU | 5809 |
| 2131 | GUAAUUUG G AACAUCCA | 2410 | UGGAUCUU GGAGGAAACUCC CU UCAAGGACAUCGUCCGGG CAAAUUAC | 5810 |
| 2134 | AUUUGGAA G AUCCAGCA | 2411 | UGCUGGAU GGAGGAAACUCC CU UCAAGGACAUCGUCCGGG UUCCAAAU | 5811 |
| 2147 | AGCAUCCA G GGAAUUAG | 2412 | CUAAUUCC GGAGGAAACUCC CU UCAAGGACAUCCUCCGGG UGGAUGCU | 5812 |
| 2148 | GCAUCCAG G GAAUUAGU | 2413 | ACUAAUUC GGAGGAAACUCC CU UCAAGGACAUCCUCCGGG CUGGAUGC | 5813 |
| 2149 | CAUCCAGG G AAUUAGUA | 2414 | UACUAAUU GGAGGAAACUCC CU UCAAGGACAUCGUCCGGG CCUGGAUG | 5814 |
| 2181 | GUUAAUAU G GGCCUAAA | 2415 | UWUAGGCC GGAGGAAACUCC CU UCAAGGACAUCGUCCGGG AUAUUAAC | 5815 |
| 2182 | UUAAUAUG G GCCUAAAA | 2416 | UUUUAGGC GGAGGAAACUCC CU UCAAGGACAUCGUCCGGG CAUAUUAA | 5816 |
| 2195 | AAAAAUCA G ACAACUAU | 2417 | AUAGUUGU GGAGGAAACUCC CU UCAAGGACAUCGUCCGGG UGAUUUUU | 5817 |
| 2207 | ACUAUUGU G GUUUCACA | 2418 | UGUGAAAC GGAGGAAACUCC CU UCAAGGACAUCGUCCGGG ACAAUAGU | 5818 |
| 2233 | UUACUUUU G GGCGAGAA | 2419 | UUCUCGCC GGAGGAAACUCC CU UCAAGGACAUCGUCCGGG AAAAGUAA | 5819 |
| 2234 | UACUUUUG G GCGAGAAA | 2420 | UUUCUCGC GGAGGAAACUCC CU UCAAGGACAUCGUCCGGG CAAAAGUA | 5820 |
| 2239 | UUGGGCGA G AAACUGUU | 2421 | AACAGUUU GGAGGAAACUCC CU UCAAGGACAUCGUCCGGG UCGCCCAA | 5821 |
| 2259 | GAAUAUUU G GUGUCUUU | 2422 | AAAGACAC GGAGGAAACUCC CU UCAAGGACAUCGUCCGGG AAAUAUUC | 5822 |
| 2269 | UGUCUUUU G GAGUGUGG | 2423 | CCACACUC GGAGGAAACUCC CU UCAAGGACAUCGUCCGGC AAAAGACA | 5823 |
| 2270 | GUCUUUUG G AGUGUGGA | 2424 | UCCACACU GGAGGAAACUCC CU UCAAGGACAUCGUCCGGG CAAAAGAC | 5824 |
| 2276 | UGGAGUGU G GAUUCGCA | 2425 | UGCGAAUC GGAGGAAACUCC CU UCAAGGACAUCGUCCGGG ACACUCCA | 5825 |
| 2277 | GGAGUGUG G AUUCGCAC | 2426 | GUGCGAAU GGAGGAAACUCC CU UCAAGGACAUCGUCCGGG CACACUCC | 5826 |
| 2300 | UGCAUAUA G ACCACCAA | 2427 | UUGGUGGU GGAGGAAACUCC CU UCAAGGACAUCGUCCGGG UAUAUGCA | 5827 |
| 2334 | ACACUUCC G GAAACUAC | 2428 | GUAGUUUC GGAGGAAACUCC CU UCAAGGACAUCGUCCGGG GGAAGUGU | 5828 |
| 2335 | CACUUCCG G AAACUACU | 2429 | AGUAGUUU GGAGGAAACUCC CU UCAAGGACAUCGUCCGGG CGGAAGUG | 5829 |
| 2351 | UGUUGUUA G ACGAAGAG | 2430 | CUCUUCGU GGAGGAAACUCC CU UCAAGGACAUCGUCCGGG UAACAACA | 5830 |
| 2357 | UAGACGAA G AGGCAGGU | 2431 | ACCUGCCU GGAGGAAACUCC CU UCAAGGACAUCGUCCGGG UUCGUCUA | 5831 |
| 2359 | GACCAAGA G GCACGUCC | 2432 | CGACCUGC CGAGCAAACUCC CU UCAACCACAUCGUCCGGG UCUUCCUC | 5832 |
| 2363 | AACACGCA G GUCCCCUA | 2433 | UACGGGAC GGAGGAAACUCC CU UCAAGGACAUCCUCCGGG UGCCUCUU | 5833 |
| 2372 | GUCCCCUA G AAGAACAA | 2434 | UUCUUCUU GCAGCAAACUCC CU UCAAGGACAUCCUCCGCG UAGGGGAC | 5834 |
| 2375 | CCCUACAA G AAGAACUC | 2435 | CAGUUCUU CGAGGAAACUCC CU UCAAGCACAUCCUCCCGG UUCUACGC | 5835 |
| 2378 | UACAAGAA G AACUCCCU | 2436 | AGGGAGUU GGAGGAAACUCC CU UCAAGGACAUCGUCCCGG UUCUUCUA | 5836 |
| 2396 | GCCUCCCA G ACCAAGGU | 2437 | ACCUUCCU CCACCAAACUCC CU UCAAGCACAUCGUCCCGC UCCCAGGC | 5837 |
| 2402 | CAGACGAA G GUCUCAAU | 2438 | AUUGAGAC CGAGGAAACUCC CU UCAAGGACAUCGUCCGGC UUCCUCUG | 5838 |
| 2423 | GCGUCCCA G AAGAUCUC | 2439 | CAGAUCUU CGAGGAAACUCC CU UCAAGCACAUCCUCCGGG UGCGACGC | 5839 |
| 2426 | UCCCAGAA G AUCUCAAU | 2440 | AUUGAGAU CGAGCAAACUCC CU UCAAGGACAUCCUCCGCC UUCUCCGA | 5840 |
| 2438 | UCAAUCUC G GGAAUCUC | 2441 | CAGAUUCC GCACCAAACUCC CU UCAAGCACAUCCUCCGGC GACAUUGA | 5841 |
| 2439 | CAAUCUCG G CAAUCUCA | 2442 | UGAGAUUC CGAGGAAACUCC CU UCAACGACAUCCUCCGGG CGAGAUUG | 5842 |
| 2440 | AAUCUCGG G AAUCUCAA | 2443 | UUCACAUU CCAGGAAACUCC CU UCAACGACAUCGUCCCCC CCGAGAUU | 5843 |
| 2463 | UAUUCCUU G GACACAUA | 2444 | UAUGUGUC GGAGGAAACUCC CU UCAAGGACAUCGUCCGGG AAGGAAUA | 5844 |
| 2464 | AUUCCUUG G ACACAUAA | 2445 | UUAUGUGU GGAGGAAACUCC CU UCAAGGACAUCGUCCGGG CAAGGAAU | 5845 |
| 2473 | ACACAUAA G GUGGGAAA | 2446 | UUUCCCAC GGAGGAAACUCC CU UCAAGGACAUCGUCCGGG UUAUGUGU | 5846 |
| 2476 | CAUAAGGU G GGAAACUU | 2447 | AAGUUUCC GCAGGAAACUCC CU UCAAGGACAUCGUCCGGG ACCUUAUG | 5847 |
| 2477 | AUAAGGUG G GPAACUUU | 2448 | AAAGUUUC GGAGGAAACUCC CU UCAAGGACAUCGUCCGGG CACCUUAU | 5848 |
| 2478 | UAAGGUGG G AAACUUUA | 2449 | UAAAGUUU GGAGGAAACUCC CU UCAAGGACAUCGUCCGGG CCACCUUA | 5849 |
| 2488 | AACUUUAC G GGGCUUUA | 2450 | UAAAGCCC GGAGGAAACUCC CU UCAAGGACAUCGUCCGGG GUAAAGUU | 5850 |
| 2489 | ACUUUACG G GGCUUUAU | 2451 | AUAAAGCC GGAGGAAACUCC CU UCAAGGACAUCGUCCGGG CGUAAAGU | 5851 |
| 2490 | CUUUACGG G GCUUUAUU | 2452 | AAUAAAGC GGAGGAAACUCC CU UCAAGGACAUCGUCCGGG CCGUAAAG | 5852 |
| 2506 | UCUUCUAC G GUACCCUG | 2453 | CAAGGUAC GGAGGAAACUCC CU UCAAGGACAUCGUCCGGG GUAGAAGA | 5853 |
| 2529 | UCCUAAAU G GCAAACUC | 2454 | GAGUUUGC GGAGGAAACUCC CU UCAAGGACAUCGUCCGGG AUUUAGGA | 5854 |
| 2563 | CAUUUGCA G GAGGACAU | 2455 | AUGUCCUC GGAGGAAACUCC CU UCAAGGACAUCGUCCGGG UGCAAAUG | 5855 |
| 2564 | AUUUGCAG G AGGACAUU | 2456 | AAUGUCCU GGAGGAAACUCC CU UCAAGGACAUCGUCCGGG CUGCAAAU | 5856 |
| 2566 | UUGCAGGA G GACAUUGU | 2457 | ACAAUGUC GGAGGAAACUCC CU UCAAGGACAUCGUCCGGG UCCUGCAA | 5857 |
| 2567 | UGCAGGAG G ACAUUGUU | 2458 | AACAAUGU GGAGGAAACUCC CU UCAAGGACAUCGUCCGGG CUCCUGCA | 5858 |
| 2580 | UGUUGAUA G AUGUAAGC | 2459 | GCUUACAU GGAGGAAACUCC CU UCAAGGACAUCGUCCGGG UAUCAACA | 5859 |
| 2596 | CAAUUUGU G GGGCCCCU | 2460 | AGGGGCCC GGAGGAAACUCC CU UCAAGGACAUCGUCCGGG ACAAAUUG | 5860 |
| 2597 | AAUUUGUG G GGCCCCUU | 2461 | AAGGGGCC GGAGGAAACUCC CU UCAAGGACAUCGUCCGGG CACAAAUU | 5861 |
| 2598 | AUUUGUGG G GCCCCUUA | 2462 | UAAGGGGC GGAGGAAACUCC CU UCAAGGACAUCGUCCGGG CCACAAAU | 5862 |
| 2622 | UGAAAACA G GAGACUUA | 2463 | UAAGUCUC GGAGGAAACUCC CU UCAAGGACAUCGUCCGGG UGUUUUCA | 5863 |
| 2623 | GAAAACAG G AGACUUAA | 2464 | UUAAGUCU GGAGGAAACUCC CU UCAAGGACAUCGUCCGGG CUGUUUUC | 5864 |
| 2625 | AAACAGGA G ACUUAAAU | 2465 | AUUUAAGU GGAGGAAACUCC CU UCAAGGACAUCGUCCGGG UCCUGUUU | 5865 |
| 2649 | GCCUGCUA G GUUUUAUC | 2466 | GAUAAAAC GGAGGAAACUCC CU UCAAGGACAUCGUCCGGG UAGCAGGC | 5866 |
| 2684 | UGCCCUUA G AUAAAGGG | 2467 | CCCUUUAU GGAGGAAACUCC CU UCAAGGACAUCGUCCGGG UAAGGGCA | 5867 |
| 2690 | UAGAUAAA G GGAUCAAA | 2468 | UUUGAUCC GGAGGAAACUCC CU UCAAGUACAUCGUCCGGG UUUAUCUA | 5868 |
| 2691 | AGAUAAAG G UAUCAAAC | 2469 | GUUUGAUC GGAGGAAACUCC CU UCAAGGACAUCGUCCGGG CUUUAUCU | 5869 |
| 2692 | GAUAAAGU G AUCAAACC | 2470 | GGUUUGAU GGAGUAAACUCC CU UCAAGGACAUCGUCCGGG CCUUUAUC | 5870 |
| 2711 | AUUAUCCA G AGUAUGUA | 2471 | UACAUACU GGAGGAAACUCC CU UCAAGUACAUCGUCCGGG UGUAUAAU | 5871 |
| 2737 | UACUUCCA G ACGCGACA | 2472 | UGUCUCGU GGAGGAAACUCC CU UCAAGGACAUCGUCCGGG UGGAAGUA | 5872 |
| 2763 | CACUCUUU G GAAGGCGG | 2473 | CCGCCUUC GGAGGAAACUCC CU UCAAGUACAUCUUCCGUG AAAGAGUG | 5873 |
| 2764 | ACUCUUUG G AAGUCGUG | 2474 | CCCGCCUU GUAGUAAACUCC CU UCAAGGACAUCUUCCGGG CAAAGAGU | 5874 |
| 2767 | CUUUGGAA G GCGGGGAU | 2475 | AUCCCCGC GGAGGAAACUCC CU UCAAGGACAUCGUCCGGG UUCCAAAG | 5875 |
| 2770 | UGGAAGUC G GUUAUCUU | 2476 | AAGAUCCC GUAGUAAACUCC CU UCAAUGACAUCGUCCGGG GCCUUCCA | 5876 |
| 2771 | GGAAGGCG G UGAUCUUA | 2477 | UAAUAUCC UUAGUAAACUCC CU UCAAUGACAUCGUCCUUG CGCCUUCC | 5877 |
| 2772 | UAAGUCGU G UAUCUUAU | 2478 | AUAAGAUC UGAGGAAACUCC CU UCAAGGACAUCUUCCGGU CCUCCUUC | 5878 |
| 2773 | AAUGCUGG G AUCUUAUA | 2479 | UAUAAUAU UGAGGAAACUCC CU UCAAGGACAUCGUCCUGU CCCGCCUU | 5879 |
| 2787 | AUAUAAAA G AGAGUCCA | 2480 | UGUACUCU UGAGGAAACUCC CU UCAAGUACAUCGUCCGGG UUUUAUAU | 5880 |
| 2789 | AUAAAAGA G AGUCCACA | 2481 | UGUGGACU GGAGGAAACUCC CU UCAAGGACAUCGUCCGGG UCUUUUAU | 5882 |
| 2816 | CAUUUUGC G GGUCACCA | 2482 | UGGUGACC GGAGGAAACUCC CU UCAAGGACAUCGUCCGGG GCAAAAUG | 5882 |
| 2817 | AUUUUGCG G GUCACCAU | 2483 | AUGGUGAC GGAGGAAACUCC CU UCAAGGACAUCGUCCGGG CGCAAAAU | 5883 |
| 2832 | AUAUUCUU G GGAACAAG | 2484 | CUUGUUCC GGAGGAAACUCC CU UCAAGGACAUCGUCCGGG AAGAAUAU | 5884 |
| 2833 | UAUUCUUG G GAACAACA | 2485 | UCUUGUUC GCAGGAAACUCC CU UCAAGGACAUCGUCCGGG CAACAAUA | 5885 |
| 2834 | AUUCUUGG G AACAAGAU | 2486 | AUCUUGUU GCACGAAACUCC CU UCAAGGACAUCGUCCGGG CCAAGAAU | 5886 |
| 2840 | GGGAACAA G AUCUACAG | 2487 | CUGUAGAU GGACGAAACUCC CU UCAAGGACAUCGUCCGGG UUGUUCCC | 5887 |
| 2852 | UACACCAU G GGAGGUUG | 2488 | CAACCUCC GGAGGAAACUCC CU UCAAGCACAUCGUCCGGG AUGCUGUA | 5888 |
| 2853 | ACAGCAUG G GAGGUUCG | 2489 | CCAACCUC GGAGGAAACUCC CU UCAAGGACAUCGUCCGCG CAUGCUGU | 5889 |
| 2854 | CAGCAUCG G ACGUUGGU | 2490 | ACCAACCU GCAGCAAACUCC CU UCAAGCACAUCGUCCGGG CCAUGCUG | 5890 |
| 2856 | CCAUGGGA G GUUGGUCU | 2491 | ACACCAAC GGAGGAAACUCC CU UCAAGGACAUCGUCCGGG UCCCAUGC | 5891 |
| 2860 | GGGAGGUU G GUCUUCCA | 2492 | UCGAACAC GGAGGAAACUCC CU UCAAGCACAUCGUCCGGG AACCUCCC | 5892 |
| 2880 | CUCGAAAA G CCAUCCCG | 2493 | CCCCAUGC GGAGCAAACUCC CU UCAAGGACAUCGUCCGGG UUUUCGAG | 5893 |
| 2885 | AAAGGCAU G GGGACAAA | 2494 | UUUCUCCC GGAGCAAACUCC CU UCAAGGACAUCGUCCGCG AUGCCUUU | 5894 |
| 2886 | AAGGCAUG G GGACAAAU | 2495 | AUUUGUCC GGAGCAAACUCC CU UCAAGGACAUCGUCCGGG CAUGCCUU | 5895 |
| 2887 | ACGCAUGC G GACAAAUC | 2496 | GAUUUCUC GGAGGAAACUCC CU UCAAGGACAUCGUCCGCG CCAUGCCU | 5896 |
| 2888 | GGCAUGGG G ACAAAUCU | 2497 | AGAUUUGU CGAGCAAACUCC CU UCAAGGACAUCGUCCGCG CCCAUGCC | 5897 |
| 2915 | AAUCCCCU G GCAUUCUU | 2498 | AACAAUCC GGAGCAAACUCC CU UCAAGGACAUCGUCCGCG AGGGGAUU | 5898 |
| 2916 | AUCCCCUG G GAUUCUUC | 2499 | GAACAAUC GGAGCAAACUCC CU UCAAGGACAUCCUCCGCG CAGGGCAU | 5899 |
| 2917 | UCCCCUGG G AUUCUUCC | 2500 | GGAACAAU CGACCAAACUCC CU UCAAGGACAUCCUCCGGG CCAGGGGA | 5900 |
| 2939 | CAUCAGUU G CACCCUGC | 2501 | CCAGCGUC CCAGCAAACUCC CU UCAAGCACAUCCUCCGGC AACUGAUC | 5901 |
| 2940 | AUCAGUUG G ACCCUGCA | 2502 | UGCACGCU GGAGCAAACUCC CU UCAAGGACAUCCUCCGCG CAACUCAU | 5902 |
| 2973 | UAAAUCCA G AUUGGGAC | 2503 | GUCCCAAU GGAGGAAACUCC CU UCAAGGACAUCGUCCGGG UGGAUUUA | 5903 |
| 2977 | UCCAGAUU G CGACCUCA | 2504 | UGAGGUCC GCAGGAAACUCC CU UCAAGGACAUCCUCCGGC AAUCUCGA | 5904 |
| 2978 | CCAGAUUG G GACCUCAA | 2505 | UUCAGGUC GGACCAAACUCC CU UCAACGACAUCGUCCGGG CAAUCUGC | 5905 |
| 2979 | CACAUUCG G ACCUCAAC | 2506 | GUUCAGCU GCACGAAACUCC CU UCAACGACAUCCUCCGGG CCAAUCUG | 5906 |
| 2996 | CCGCACAA G GACAACUG | 2507 | CACUUGUC CCACGAAACUCC CU UCAACGACAUCCUCCCGC UUGUGCGC | 5907 |
| 2997 | CCCACAAG G ACAACUCG | 2508 | CCACUUCU CCACGAAACUCC CU UCAACCACAUCCUCCCGC CUUGUCCC | 5908 |
| 3004 | GGACAACU G GCCGGACG | 2509 | CCUCCCCC GCACGAAACUCC CU UCAACGACAUCCUCCGGC AGUUGUCC | 5909 |
| 3008 | AACUGCCC G GACCCCAA | 2510 | UUGCCGUC GCACGAAACUCC CU UCAACGACAUCCUCCCGC GGCCACUU | 5910 |
| 3009 | ACUCGCCC G ACGCCAAC | 2511 | GUUCGCCU GCACGAAACUCC CU UCAACGACAUCCUCCCGC CGCCCAGU | 5911 |
| 3020 | GCCAACAA G GUCCGAGU | 2512 | ACUCCCAC GCACGAAACUCC CU UCAACGACAUCCUCCGGG UUCUUCGC | 5912 |
| 3023 | AACAACCU G GCACUCGC | 2513 | CCCACUCC GCACGAAACUCC CU UCAACGACAUCCUCCCGC ACCUUGUU | 5913 |
| 3024 | ACAACGUC G CACUCCGA | 2514 | UCCCACUC CCACCAAACUCC CU UCAACGACAUCCUCCCGC CACCUUCU | 5914 |
| 3025 | CAAGGUCG G AGUCCGAC | 2515 | CUCCCACU CCACCAAACUCC CU UCAAGCACAUCGUCCCGC CCACCUUC | 5915 |
| 3029 | CUCGCACU G CGAGCAUU | 2516 | AAUCCUCC GGAGCAAACUCC CU UCAACCACAUCGUCCCGC ACUCCCAC | 5916 |
| 3030 | UGCGACUG G GACCAUUC | 2517 | GAAUGCUC CGAGCAAACUCC CU UCAACCACAUCGUCCCGC CACUCCCA | 5917 |
| 3031 | GGGAGUGG G AGCAUUCG | 2518 | CGAAUGCU GGAGGAAACUCC CU UCAAGGACAUCCUCCGGC CCACUCCC | 5918 |
| 3039 | GAGCAUUC G GGCCAGGG | 2519 | CCCUGGCC GGAGGAAACUCC CU UCAAGGACAUCGUCCGGG GAAUGCUC | 5919 |
| 3040 | AGCAUUCG G GCCAGGGU | 2520 | ACCCUGGC GGAGGAAACUCC CU UCAAGGACAUCGUCCGGG CGAAUGCU | 5920 |
| 3045 | UCGGGCCA G GGUUCACC | 2521 | GGUGAACC GGAGGAAACUCC CU UCAAGGACAUCGUCCGGG UGGCCCGA | 5921 |
| 3046 | CGGGCCAG G GUUCACCC | 2522 | GGGUGAAC GGAGGAAACUCC CU UCAAGGACAUCGUCCGGG CUGGCCCG | 5922 |
| 3063 | CUCCCCAU G GGGGACUG | 2523 | CAGUCCCC GGAGGAAACUCC CU UCAAGGACAUCGUCCGGG AUGGGGAG | 5923 |
| 3064 | UCCCCAUG G GGGACUGU | 2524 | ACAGUCCC GGAGGAAACUCC CU UCAAGGACAUCGUCCGGG CAUGGGGA | 5924 |
| 3065 | CCCCAUGG G GGACUGUU | 2525 | AACAGUCC GGAGGAAACUCC CU UCAAGCACAUCGUCCGGG CCAUGGGG | 5925 |
| 3066 | CCCAUGGG G GACUGUUG | 2526 | CAACAGUC GGAGGAAACUCC CU UCAAGGACAUCGUCCGGG CCCAUGUG | 5926 |
| 3067 | CCAUGGGG G ACUGUUGG | 2527 | CCAACAGU GGAGGAAACUCC CU UCAAGGACAUCGUCCGGG CCCCAUGG | 5927 |
| 3074 | GGACUGUU G UGGUGGAG | 2528 | CUCCACCC GGAGGAAACUCC CU UCAAGGACAUCGUCCGGG AACAGUCC | 5928 |
| 3075 | GACUGUUG G GGUGGAGC | 2529 | GCUCCACC GGAGGAAACUCC CU UCAAGGACAUCGUCCGGG CAACAGUC | 5929 |
| 3076 | ACUGUUGG G GUGGAGCC | 2530 | GGCUCCAC GGAGGAAACUCC CU UCAAGGACAUCGUCCGGG CCAACAGU | 5930 |
| 3079 | GUUGGGGU G GAGCCCUC | 2531 | GAGGGCUC GGAGGAAACUCC CU UCAAGGACAUCGUCCGGG ACCCCAAC | 5931 |
| 3080 | UUGGGGUG G AGCCCUCA | 2532 | UGAGGGCU GGAGGAAACUCC CU UCAAGGACAUCGUCCGGG CACCCCAA | 5932 |
| 3095 | CACGCUCA G GGCCUACU | 2533 | AGUAGGCC GGAGGAAACUCC CU UCAAGGACAUCGUCCGGG UGAGCGUG | 5933 |
| 3096 | ACUCUCAG G UCCUACUC | 2534 | GAGUAGGC GGAGGAAACUCC CU UCAAGGACAUCGUCCGGG CUGAGCGU | 5934 |
| 3145 | CACCAAUC G GCAGUCAG | 2535 | CUGACUGC GUAGGAAACUCC CU UCAAGGACAUCGUCCGGG GACUGGUG | 5935 |
| 3153 | GGCAGUCA G GAAGGCAG | 2536 | CUGCCUUC GGAGGAAACUCC CU UCAAGGACAUCGUCCGGG UGACUGCC | 5936 |
| 3154 | GCAGUCAG G AAGGCAUC | 2537 | GCUUCCUU GGAGGAAACUCC CU UCAAGGACAUCGUCCGGG CUGACUGC | 5937 |
| 3157 | GUCAGGAA G GCAGCCUA | 2538 | UAGGCUGC GGAGGAAACUCC CU UCAAGGACAUCGUCCGGG UUCCUGAC | 5938 |
| 3187 | ACCUCUAA G UGACACUC | 2539 | GAGUGUCC GGAGUAAACUCC CU UCAAGGACAUCGUCCGGG UUAGAGGU | 5939 |
| 3188 | CCUCUAAG G GACACUCA | 2540 | UGAGUGUC GGAGGAAACUCC CU UCAAGGACAUCGUCCGGG CUUAGAGG | 5940 |
| 3189 | CUCUAAGU G ACACUCAU | 2541 | AUUAGUUU GGAGGAAACUCC CU UCAAUGACAUCUUCCUGG CCUUAUAU | 5941 |
| 3203 | CAUCCUCA G GCCAUUCA | 2542 | UGCAUUGC GGAGGAAACUCC CU UCAAUGACAUCUUCCGUG UGAUGAUG | 5942 |
| Input Sequence = AF100308. | | | | |
| Cut Site = YG/M or UG/U. | | | | |
| Stem Length = 8. | | | | |

Core Sequence = GGAGGAAACUCC CU UCAAGGACAUCGUCCGG
AF100308 (Hepatitis B virus strain 2-18, 3215 bp)

[0254] TABLE XI
Human HBV Enzymatic Nucleic Acid and Target Sequence

| | | | | | | |
|---|---|---|---|---|---|---|
| | | SEQ | | Enzymatic nucleic | | SEQ |
| Pos | SUBSTRATE | ID | RPI# | acid Alias | ENZYMATIC NUCLEIC ACID | ID |

| | | | | | | |
|---|---|---|---|---|---|---|
| 313 | CCAAAAU U CGCAGUC | 5943 | 18157 | HBV-313 Rz-7 RNA | GACUGCG CUGAUGAGGCCGUUAGGCCGAA AUUUUGG B | 6175 |
| 327 | CCCAAAU C UCCAGUC | 5944 | 18158 | HBV-327 Rz-7 RNA | GACUGGA CUGAUGAGGCCGUUAGGCCGAA AUUUGGG B | 6176 |
| 334 | CUCCAGU C ACUCACC | 5945 | 18159 | HBV-334 Rz-7 RNA | GGUGAGU CUGAUGAGGCCGUUAGGCCGAA ACUGGAG B | 6177 |
| 408 | UCUUCCU C UGCAUCC | 5946 | 18160 | HBV-408 Rz-7 RNA | GGAUGCA CUGAUGAGGCCGUUAGGCCGAA AGGAAGA B | 6178 |
| 557 | UCUAUGU U UCCCUCA | 5947 | 18161 | HBV-557 Rz-7 RNA | UGAGGGA CUGAUGAGGCCGUUAGGCCGAA ACAUAGA B | 6179 |
| 1255 | UUUGUGU C UCCUCUG | 5948 | 18162 | HBV-1255 Rz-7 RNA | CAGAGGA CUGAUGAGGCCGUUAGGCCGAA ACACAAA B | 6180 |
| 1538 | CCUCUCU U UACGCGG | 5949 | 18163 | HBV-1538 Rz-7 RNA | CCGCGUA CUGAUGAGGCCGUUAGGCCGAA AGAGAGG B | 6181 |
| 1756 | AGGAGGU U AGGUUAA | 5950 | 18164 | HBV-1756 Rz-7 RNA | UUAACCU CUGAUGAGGCCGUUAGGCCGAA ACCUCCU B | 6182 |
| 1861 | AUGUCCU A CUGUUCA | 5951 | 18165 | HBV-1861 Rz-7 RNA | UGAACAG CUGAUGAGGCCGUUAGGCCGAA AGGACAU B | 6183 |
| 2504 | UUCUUCU A CGGUACC | 5952 | 18166 | HBV-2504 Rz-7 RNA | GGUACCG CUGAUGAGGCCGUUAGGCCGAA AGAAGAA B | 6184 |
| 10 | CUCCACC A CUUUCCA | 5953 | 18197 | HBV-10 CHz-7 RNA | UGGAAAG CUGAUGAGGCCGUUAGGCCGAA GGUGGAG B | 6185 |
| 335 | UCCAGUC A CUCACCA | 5954 | 18198 | HBV-335 CHz-7 RNA | UGGUGAG CUGAUGAGGCCGUUAGGCCGAA GACUGGA B | 6186 |
| 1258 | GUGUCUC C UCUGCCG | 5955 | 18199 | HBV-1258 CHz-7 RNA | CGGCAGA CUGAUGAGGCCGUUAGGCCGAA GAGACAC B | 6187 |
| 2307 | GACCACC A AAUGCCC | 5956 | 18200 | HBV-2307 CHz-7 RNA | GGGCAUU CUGAUGAGGCCGUUAGGCCGAA GGUGGUC B | 6188 |
| 347 | UCACCAACCU G UUGUC | 5957 | 18216 | HBV-347 GCl.Rz-5/10 | GACAA UGAUGGCAUGCACUAUGCGCG AGGUUGGUGA B | 6189 |
| | | | | RNA | | |
| 350 | CCAACCUGUU G UCCUC | 5958 | 18217 | HBV-350 GCl.Rz-5/10 | GAGGA UGAUGGCAUGCACUAUGCGCG AACAGGUUGG B | 6190 |
| | | | | RNA | | |
| 1508 | UCCGCCUAUU G UACCG | 5959 | 18218 | HBV-1508 GCl.Rz- | CGGUA UGAUGGCAUGCACUAUGCGCG AAUAGGCGGA B | 6191 |
| | | | | 5/10 RNA | | |
| 234 | AAUCCU C ACAAUA | 5960 | 18334 | HBV-234 Rz-6 allyl | uₛaₛuₛuₛgu cUGAuGaggccguuaggccGaa Aggauu B | 6192 |
| | | | | stab1 | | |
| 252 | GAGUCU A GACUCG | 5961 | 18335 | HBV-252 Rz-6 allyl | cₛgₛaₛgₛuc cUGAuGaggccguuaggccGaa Agacuc B | 6193 |
| | | | | stab1 | | |
| 268 | UGGACU U CUCUCA | 5962 | 18337 | HBV-268 Rz-6 allyl | uₛgₛaₛgₛag cUGAuGaggccguuaggccGaa Agucca B | 6194 |
| | | | | stab1 | | |
| 280 | AAUUUU C UAGGGG | 5963 | 18345 | HBV-280 Rz-6 allyl | cₛcₛcₛcₛua cUGAuGaggccguuaggccGaa Aaaauu B | 6195 |
| | | | | stab1 | | |
| 313 | CAAAAU U CGCAGU | 5964 | 18346 | HBV-313 Rz-6 allyl | aₛcₛuₛgₛcg cUGAuGaggccguuaggccGaa Auuuug B | 6196 |
| | | | | stab1 | | |
| 395 | GGCGUU U UAUCAU | 5965 | 18350 | HBV-395 Rz-6 allyl | aₛuₛgₛaₛua cUGAuGaggccguuaggccGaa Aacgcc B | 6197 |
| | | | | stab1 | | |
| 402 | UAUCAU C UUCCUC | 5966 | 18351 | HBV-402 Rz-6 allyl | gₛaₛgₛgₛaa cUGAuGaggccguuaggccGaa Augaua B | 6198 |
| | | | | stab1 | | |
| 607 | UGUAUU C CCAUCC | 5967 | 18355 | HBV-607 Rz-6 allyl | gₛgₛaₛuₛgg cUGAuGaggccguuaggccGaa Aauaca B | 6199 |
| | | | | stab1 | | |
| 697 | UUUGUU C AGUGGU | 5968 | 18362 | HBV-697 Rz-6 allyl | aₛcₛcₛaₛcu cUGAuGaggccguuaggccGaa Aacaaa B | 6200 |
| | | | | stab1 | | |
| 1539 | UCUCUU U ACGCGG | 5969 | 18366 | HBV-1539 Rz-6 allyl | cₛcₛgₛcₛgu cUGAuGaggccguuaggccGaa Aagaga B | 6201 |
| | | | | stab1 | | |
| 1599 | UCACCU C UGCACG | 5970 | 18367 | HBV-1599 Rz-6 allyl | cₛgₛuₛgₛca cUGAuGaggccguuaggccGaa Agguga B | 6202 |
| | | | | stab1 | | |
| 1607 | GCACGU C GCAUGG | 5971 | 18368 | HBV-1607 Rz-6 allyl | cₛcₛaₛuₛgc cUGAuGaggccguuaggccGaa Acgugc B | 6203 |
| | | | | stab1 | | |
| 1833 | UCACCU C UGCCUA | 5972 | 18371 | HBV-1833 Rz-6 allyl | uₛaₛgₛgₛca cUGAuGaggccguuaggccGaa Agguga B | 6204 |
| | | | | stab1 | | |
| 2383 | AGAACU C CCUCGC | 5973 | 18374 | HBV-2383 Rz-6 allyl | gₛcₛgₛaₛgg cUGAuGaggccguuaggccGaa Aguucu B | 6205 |
| | | | | stab1 | | |
| 2429 | GAAGAU C UCAAUC | 5974 | 18376 | HBV-2429 Rz-6 allyl | gₛaₛuₛuₛga cUGAuGaggccguuaggccGaa Aucuuc B | 6206 |
| | | | | stab1 | | |
| 2831 | UAUUCU U GGGAAC | 5975 | 18379 | HBV-2831 Rz-6 allyl | gₛuₛuₛcₛcc cUGAuGaggccguuaggccGaa Agaaua B | 6207 |
| | | | | stab1 | | |
| 430 | UGCCUC A UCUUCU | 5976 | 18391 | HBV-430 CHz-6 allyl | aₛgₛaₛaₛga cUGAuGaggccguuaggccGaa Iaggca B | 6208 |
| | | | | stab1 | | |
| 676 | UGGCUC A GUUUAC | 5977 | 18396 | HBV-676 CHz-6 allyl | gₛuₛaₛaₛac cUGAuGaggccguuaggccGaa Iagcca B | 6209 |
| | | | | stab1 | | |
| 683 | GUUUAC U AGUGCC | 5978 | 18397 | HBV-683 CHz-6 allyl | gₛgₛcₛaₛcu cUGAuGaggccguuaggccGaa Iuaaac B | 6210 |
| | | | | stab1 | | |
| 1150 | UUUACC C CGUUGC | 5979 | 18402 | HBV-1150 CHz-6 | gₛcₛaₛaₛcg cUGAuGaggccguuaggccGaa Iguaaa B | 6211 |
| | | | | allyl stab1 | | |
| 1200 | GCAACC C CCACUG | 5980 | 18403 | HBV-1200 CHz-6 | cₛaₛgₛuₛgg cUGAuGaggccguuaggccGaa Iguugc B | 6212 |
| | | | | allyl stab1 | | |
| 1201 | CAACCC C CACUGG | 5981 | 18404 | HBV-1201 CHz-6 | cₛcₛaₛgₛug cUGAuGaggccguuaggccGaa Igguug B | 6213 |
| | | | | allyl stab1 | | |
| 1444 | CGGCGC U GAAUCC | 5982 | 18405 | HBV-1444 CHz-6 | gₛgₛaₛuₛuc cUGAuGaggccguuaggccGaa Icgccg B | 6214 |
| | | | | allyl stab1 | | |
| 1451 | GAAUCC C GCGGAC | 5983 | 18406 | HBV-1451 CHz-6 | gₛuₛcₛcₛgc cUGAuGaggccguuaggccGaa Igauuc B | 6215 |
| | | | | allyl stab1 | | |
| 1533 | CGCACC U CUCUUU | 5984 | 18407 | HBV-1533 CHz-6 | aₛaₛaₛgₛag cUGAuGaggccguuaggccGaa Igugcg B | 6216 |
| | | | | allyl stab1 | | |
| 1600 | CACCUC U GCACGU | 5985 | 18410 | HBV-1600 CHz-6 | aₛcₛgₛuₛgc cUGAuGaggccguuaggccGaa Iaggug B | 6217 |
| | | | | allyl stab1 | | |
| 1698 | CCGACC U UGAGGC | 5986 | 18411 | HBV-1698 CHz-6 | gₛcₛcₛuₛca cUGAuGaggccguuaggccGaa Igucgg B | 6218 |
| | | | | allyl stab1 | | |
| 1784 | GGAGGC U GUAGGC | 5987 | 18412 | HBV-1784 CHz-6 | gₛcₛcₛuₛac cUGAuGaggccguuaggccGaa Iccucc B | 6219 |
| | | | | allyl stab1 | | |
| 1829 | UUUUUC A CCUCUG | 5988 | 18414 | HBV-1829 CHz-6 | cₛaₛgₛaₛgg cUGAuGaggccguuaggccGaa Iaaaaa B | 6220 |
| | | | | allyl stab1 | | |
| 1876 | GCCUCC A AGCUGU | 5989 | 18420 | HBV-1876 CHz-6 | aₛcₛaₛgₛcu cUGAuGaggccguuaggccGaa Igaggc B | 6221 |
| | | | | allyl stab1 | | |
| 1880 | CCAAGC U GUGCCU | 5990 | 18422 | HBV-1880 CHz-6 | aₛgₛgₛcₛac cUGAuGaggccguuaggccGaa Icuugg B | 6222 |
| | | | | allyl stab1 | | |
| 218 | UUUUUCU U GUUGACA | 5991 | 18333 | HBV-218 Rz-7 allyl | uₛgₛuₛcₛaac cUGAuGaggccguuaggccGaa Agaaaaa B | 6223 |
| | | | | stab1 | | |
| 257 | CUAGACU C GUGGUGG | 5992 | 18336 | HBV-257 Rz-7 allyl | cₛcₛaₛcₛcac cUGAuGaggccguuaggccGaa Agucuag B | 6224 |
| | | | | stab1 | | |
| 268 | GUGGACU U CUCUCAA | 5993 | 18338 | HBV-268 Rz-7 allyl | uₛuₛgₛaₛgag cUGAuGaggccguuaggccGaa Aguccac B | 6225 |
| | | | | stab1 | | |
| 269 | UGGACUU C UCUCAAU | 5994 | 18339 | HBV-269 Rz-7 allyl | aₛuₛuₛgₛaga cUGAuGaggccguuaggccGaa Aagucca B | 6226 |
| | | | | stab1 | | |
| 271 | GACUUCU C UCAAUUU | 5995 | 18340 | HBV-271 Rz-7 allyl | aₛaₛaₛuₛuga cUGAuGaggccguuaggccGaa Agaaguc B | 6227 |
| | | | | stab1 | | |
| 273 | CUUCUCU C AAUUUUC | 5996 | 18341 | HBV-273 Rz-7 allyl | gₛaₛaₛaₛauu cUGAuGaggccguuaggccGaa Agagaag B | 6228 |
| | | | | stab1 | | |
| 277 | UCUCAAU U UUCUAGG | 5997 | 18342 | HBV-277 Rz-7 allyl | cₛcₛuₛaₛgaa cUGAuGaggccguuaggccGaa Auugaga B | 6229 |
| | | | | stab1 | | |
| 278 | CUCAAUU U UCUAGGG | 5998 | 18343 | HBV-278 Rz-7 allyl | cₛcₛcₛuₛaga cUGAuGaggccguuaggccGaa Aauugag B | 6230 |
| | | | | stab1 | | |
| 279 | UCAAUUU U CUAGGGG | 5999 | 18344 | HBV-279 Rz-7 allyl | cₛcₛcₛcₛuag cUGAuGaggccguuaggccGaa Aaauuga B | 6231 |
| | | | | stab1 | | |
| 314 | CAAAAUU C GCAGUCC | 6000 | 18347 | HBV-314 Rz-7 allyl | gₛgₛaₛcₛugc cUGAuGaggccguuaggccGaa Aauuuug B | 6232 |
| | | | | stab1 | | |
| 385 | GAUGUGU C UGCGGCG | 6001 | 18348 | HBV-385 Rz-7 allyl | cₛgₛcₛcₛgca cUGAuGaggccguuaggccGaa Acacauc B | 6233 |
| | | | | stab1 | | |
| 394 | GCGGCGU U UUAUCAU | 6002 | 18349 | HBV-394 Rz-7 allyl | aₛuₛgₛaₛuaa cUGAuGaggccguuaggccGaa Acgccgc B | 6234 |
| | | | | stab1 | | |
| 402 | UUAUCAU C UUCCUCU | 6003 | 18352 | HBV-402 Rz-7 allyl | aₛgₛaₛgₛgaa cUGAuGaggccguuaggccGaa Augauaa B | 6235 |
| | | | | stab1 | | |
| 423 | UGCUGCU A UGCCUCA | 6004 | 18353 | HBV-423 Rz-7 allyl | uₛgₛaₛgₛgca cUGAuGaggccguuaggccGaa Agcagca B | 6236 |
| | | | | stab1 | | |
| 429 | UAUGCCU C AUCUUCU | 6005 | 18354 | HBV-429 Rz-7 allyl | aₛgₛaₛaₛgau cUGAuGaggccguuaggccGaa Aggcaua B | 6237 |
| | | | | stab1 | | |
| 679 | GCUCAGU U UACUAGU | 6006 | 18356 | HBV-679 Rz-7 allyl | aₛcₛuₛaₛgua cUGAuGaggccguuaggccGaa Acugagc B | 6238 |
| | | | | stab1 | | |
| 680 | CUCAGUU U ACUAGUG | 6007 | 18357 | HBV-680 Rz-7 allyl | cₛaₛcₛuₛagu cUGAuGaggccguuaggccGaa Aacugag B | 6239 |
| | | | | stab1 | | |
| 681 | UCAGUUU A CUAGUGC | 6008 | 18358 | HBV-681 Rz-7 allyl | gₛcₛaₛcₛuag cUGAuGaggccguuaggccGaa Aaacuga B | 6240 |
| | | | | stab1 | | |
| 684 | GUUUACU A GUGCCAU | 6009 | 18359 | HBV-684 Rz-7 allyl | aₛuₛgₛgₛcac cUGAuGaggccguuaggccGaa Aguaaac B | 6241 |
| | | | | stab1 | | |
| 692 | GUGCCAU U UGUUCAG | 6010 | 18360 | HBV-692 Rz-7 allyl | cₛuₛgₛaₛaca cUGAuGaggccguuaggccGaa Auggcac B | 6242 |
| | | | | stab1 | | |
| 693 | UGCCAUU U GUUCAGU | 6011 | 18361 | HBV-693 Rz-7 allyl | aₛcₛuₛgₛaac cUGAuGaggccguuaggccGaa Aauggca B | 6243 |
| | | | | stab1 | | |
| 1534 | CGCACCU C UCUUUAC | 6012 | 18363 | HBV-1534 Rz-7 allyl | gₛuₛaₛaₛaga cUGAuGaggccguuaggccGaa Aggugcg B | 6244 |
| | | | | stab1 | | |
| 1536 | CACCUCU C UUUACGC | 6013 | 18364 | HBV-1536 Rz-7 allyl | gₛcₛgₛuₛaaa cUGAuGaggccguuaggccGaa Agaggug B | 6245 |
| | | | | stab1 | | |
| 1538 | CCUCUCU U UACGCGG | 6014 | 18365 | HBV-1538 Rz-7 allyl | cₛcₛgₛcₛgua cUGAuGaggccguuaggccGaa Agagagg B | 6246 |
| | | | | stab1 | | |
| 1787 | AGGCUGU A GGCAUAA | 6015 | 18369 | HBV-1787 Rz-7 allyl | uₛuₛaₛuₛgcc cUGAuGaggccguuaggccGaa Acagccu B | 6247 |
| | | | | stab1 | | |
| 1793 | UAGGCAU A AAUUGGU | 6016 | 18370 | HBV-1793 Rz-7 allyl | aₛcₛcₛaₛauu cUGAuGaggccguuaggccGaa Augccua B | 6248 |
| | | | | stab1 | | |
| 1874 | CAAGCCU C CAAGCUG | 6017 | 18372 | HBV-1874 Rz-7 allyl | cₛaₛgₛcₛuug cUGAuGaggccguuaggccGaa Aggcuug B | 6249 |
| | | | | stab1 | | |
| 1887 | UGUGCCU U GGGUGGC | 6018 | 18373 | HBV-1887 Rz-7 allyl | gₛcₛcₛaₛccc cUGAuGaggccguuaggccGaa Aggcaca B | 6250 |
| | | | | stab1 | | |
| 2383 | AAGAACU C CCUCGCC | 6019 | 18375 | HBV-2383 Rz-7 allyl | gₛgₛcₛgₛagg cUGAuGaggccguuaggccGaa Aguucuu B | 6251 |
| | | | | stab1 | | |
| 2828 | ACCAUAU U CUUGGGA | 6020 | 18377 | HBV-2828 Rz-7 allyl | uₛcₛcₛcₛaag cUGAuGaggccguuaggccGaa Auauggu B | 6252 |
| | | | | stab1 | | |
| 2829 | CCAUAUU C UUGGGAA | 6021 | 18378 | HBV-2829 Rz-7 allyl | uₛuₛcₛcₛcaa cUGAuGaggccguuaggccGaa Aauaugg B | 6253 |
| | | | | stab1 | | |
| 2831 | AUAUUCU U GGGAACA | 6022 | 18380 | HBV-2831 Rz-7 allyl | uₛgₛuₛuₛccc cUGAuGaggccguuaggccGaa Agaauau B | 6254 |
| | | | | stab1 | | |
| 256 | UCUAGAC U CGUGGUG | 6023 | 18381 | HBV-256 CHz-7 allyl | cₛaₛcₛcₛacg cUGAuGaggccguuaggccGaa Iucuaga B | 6255 |
| | | | | stab1 | | |
| 267 | GGUGGAC U UCUCUCA | 6024 | 18382 | HBV-267 CHz-7 allyl | uₛgₛaₛgₛaga cUGAuGaggccguuaggccGaa Iuccacc B | 6256 |
| | | | | stab1 | | |
| 270 | GGACUUC U CUCAAUU | 6025 | 18383 | HBV-270 CHz-7 allyl | aₛaₛuₛuₛgag cUGAuGaggccguuaggccGaa Iaagucc B | 6257 |
| | | | | stab1 | | |
| 272 | ACUUCUC U CAAUUUU | 6026 | 18384 | HBV-272 CHz-7 allyl | aₛaₛaₛaₛuug cUGAuGaggccguuaggccGaa Iagaagu B | 6258 |
| | | | | stab1 | | |
| 274 | UUCUCUC A AUUUUCU | 6027 | 18385 | HBV-274 CHz-7 allyl | aₛgₛaₛaₛaau cUGAuGaggccguuaggccGaa Iagagaa B | 6259 |
| | | | | stab1 | | |
| 386 | AUGUGUC U GCGGCGU | 6028 | 18386 | HBV-386 CHz-7 allyl | aₛcₛgₛcₛcgc cUGAuGaggccguuaggccGaa Iacacau B | 6260 |
| | | | | stab1 | | |
| 419 | AUCCUGC U GCUAUGC | 6029 | 18387 | HBV-419 CHz-7 allyl | gₛcₛaₛuₛagc cUGAuGaggccguuaggccGaa Icaggau B | 6261 |
| | | | | stab1 | | |
| 422 | CUGCUGC U AUGCCUC | 6030 | 18388 | HBV-422 CHz-7 allyl | gₛaₛgₛgₛcau cUGAuGaggccguuaggccGaa Icagcag B | 6262 |
| | | | | stab1 | | |
| 427 | GCUAUGC C UCAUCUU | 6031 | 18389 | HBV-427 CHz-7 allyl | aₛaₛgₛaₛuga cUGAuGaggccguuaggccGaa Icauagc B | 6263 |
| | | | | stab1 | | |
| 428 | CUAUGCC U CAUCUUC | 6032 | 18390 | HBV-428 CHz-7 allyl | gₛaₛaₛgₛaug cUGAuGaggccguuaggccGaa Igcauag B | 6264 |
| | | | | stab1 | | |
| 430 | AUGCCUC A UCUUCUU | 6033 | 18392 | HBV-430 CHz-7 allyl | aₛaₛgₛaₛaga cUGAuGaggccguuaggccGaa Iaggcau B | 6265 |
| | | | | stab1 | | |
| 608 | UGUAUUC C CAUCCCA | 6034 | 18393 | HBV-608 CHz-7 allyl | uₛgₛgₛgₛaug cUGAuGaggccguuaggccGaa Iaauaca B | 6266 |
| | | | | stab1 | | |
| 609 | GUAUUCC C AUCCCAU | 6035 | 18394 | HBV-609 CHz-7 allyl | aₛuₛgₛgₛgau cUGAuGaggccguuaggccGaa Igaauac B | 6267 |
| | | | | stab1 | | |
| 669 | GUUUCUC U UGGCUCA | 6036 | 18395 | HBV-669 CHz-7 allyl | uₛgₛaₛgₛcca cUGAuGaggccguuaggccGaa Iagaaac B | 6268 |
| | | | | stab1 | | |
| 689 | CUAGUGC C AUUUGUU | 6037 | 18398 | HBV-689 CHz-7 allyl | aₛaₛcₛaₛaau cUGAuGaggccguuaggccGaa Icacuag B | 6269 |
| | | | | stab1 | | |
| 690 | UAGUGCC A UUUGUUC | 6038 | 18399 | HBV-690 CHz-7 aLlyl | gₛaₛaₛcₛaaa cUGAuGaggccguuaggccGaa Igcacua B | 6270 |
| | | | | stab1 | | |
| 718 | GCUUUCC C CCACUGU | 6039 | 18400 | HBV-718 CHz-7 allyl | aₛcₛaₛgₛugg cUGAuGaggccguuaggccGaa Igaaagc B | 6271 |
| | | | | stab1 | | |
| 1149 | CCUUUAC C CCGUUGC | 6040 | 18401 | HBV-1149 CHz-7 | gₛcₛaₛaₛcgg cUGAuGaggccguuaggccGaa Iuaaagg B | 6272 |
| | | | | allyl stab1 | | |
| 1535 | GCACCUC U CUUUACG | 6041 | 18408 | HBV-1535 CHz-7 | cₛgₛuₛaₛaag cUGAuGaggccguuaggccGaa Iaggugc B | 6273 |
| | | | | allyl stab1 | | |
| 1537 | ACCUCUC U UUACGCG | 6042 | 18409 | HBV-1537 CHz-7 | cₛgₛcₛgₛuaa cUGAuGaggccguuaggccGaa Iagaggu B | 6274 |
| | | | | allyl stab1 | | |
| 1791 | UGUAGGC A UAAAUUG | 6043 | 18413 | HBV-1791 CHz-7 | cₛaₛaₛuₛuua cUGAuGaggccguuaggccGaa Iccuaca B | 6275 |
| | | | | allyl stab1 | | |
| 1831 | UUUUCAC C UCUGCCU | 6044 | 18415 | HBV-1831 CHz-7 | aₛgₛgₛcₛaga cUGAuGaggccguuaggccGaa Iugaaaa B | 6276 |
| | | | | allyl stab1 | | |
| 1832 | UUUCACC U CUGCCUA | 6045 | 18416 | HBV-1832 CHz-7 | uₛaₛgₛgₛcag cUGAuGaggccguuaggccGaa Igugaaa B | 6277 |
| | | | | allyl stab1 | | |
| 1872 | UUCAAGC C UCCAAGC | 6046 | 18417 | HBV-1872 CHz-7 | gₛcₛuₛuₛgga cUGAuGaggccguuaggccGaa Icuugaa B | 6278 |
| | | | | allyl stab1 | | |
| 1873 | UCAAGCC U CCAAGCU | 6047 | 18418 | HBV-1873 CHz-7 | aₛgₛcₛuₛugg cUGAuGaggccguuaggccGaa Igcuuga B | 6279 |
| | | | | allyl stab1 | | |
| 1875 | AAGCCUC C AAGCUGU | 6048 | 18419 | HBV-1875 CHz-7 | aₛcₛaₛgₛcuu cUGAuGaggccguuaggccGaa Iaggcuu B | 6280 |
| | | | | allyl stab1 | | |
| 1876 | AGCCUCC A AGCUGUG | 6049 | 18421 | HBV-1876 CHz-7 | cₛaₛcₛaₛgcu cUGAuGaggccguuaggccGaa Igaggcu B | 6281 |
| | | | | allyl stab1 | | |
| 1880 | UCCAAGC U GUGCCUU | 6050 | 18423 | HBV-1880 CHz-7 | aₛaₛgₛgₛcac cUGAuGaggccguuaggccGaa Icuugga B | 6282 |
| | | | | allyl stab1 | | |
| 2382 | GAAGAAC U CCCUCGC | 6051 | 18424 | HBV-2382 CHz-7 | gₛcₛgₛaₛggg cUGAuGaggccguuaggccGaa Iuucuuc B | 6283 |
| | | | | allyl stab1 | | |
| 2384 | AGAACUC C CUCGCCU | 6052 | 18425 | HBV-2384 CHz-7 | aₛgₛgₛcₛgag cUGAuGaggccguuaggccGaa Iaguucu B | 6284 |
| | | | | allyl stab1 | | |
| 2385 | GAACUCC C UCGCCUC | 6053 | 18426 | HBV-2385 CHz-7 | gₛaₛgₛgₛcga cUGAuGaggccguuaggccGaa Igaguuc B | 6285 |
| | | | | allyl stab1 | | |
| 2422 | GCGUCGC A GAAGAUC | 6054 | 18427 | HBV-2422 CHz-7 | gₛaₛuₛcₛuuc cUGAuGaggccguuaggccGaa Icgacgc B | 6286 |
| | | | | allyl stab1 | | |
| 2830 | CAUAUUC U UGGGAAC | 6055 | 18428 | HBV-2830 CHz-7 | gₛuₛuₛcₛcca cUGAuGaggccguuaggccGaa Iaauaug B | 6287 |
| | | | | allyl stab1 | | |
| 234 | AAUCCU C ACAAUA | 6056 | 19179 | HBV-234 Rz-6 amino | uₛaₛuₛuₛgu cUGAUGaggccguuaggccGaa Aggauu B | 6288 |
| | | | | stab1 | | |
| 252 | GAGUCU A GACUCG | 6057 | 19180 | HBV-252 Rz-6 amino | cₛgₛaₛgₛuc cUGAUGaggccguuaggccGaa Agacuc B | 6289 |
| | | | | stab1 | | |
| 268 | UGGACU U CUCUCA | 6058 | 19182 | HBV-268 Rz-6 amino | uₛgₛaₛgₛag cUGAUGaggccguuaggccGaa Agucca B | 6290 |
| | | | | stab1 | | |
| 280 | AAUUUU C UAGGGG | 6059 | 19190 | HBV-280 Rz-6 amino | cₛcₛcₛcₛua cUGAUGaggccguuaggccGaa Aaaauu B | 6291 |
| | | | | stab1 | | |
| 313 | CAAAAU U CGCAGU | 6060 | 19191 | HBV-313 Rz-6 amino | aₛcₛuₛgₛcg cUGAUGaggccguuaggccGaa Auuuug B | 6292 |
| | | | | stab1 | | |
| 395 | GGCGUU U UAUCAU | 6061 | 19195 | HBV-395 Rz-6 amino | aₛuₛgₛaₛua cUGAUGaggccguuaggccGaa Aacgcc B | 6293 |
| | | | | stab1 | | |
| 402 | UAUCAU C UUCCUC | 6062 | 19196 | HBV-402 Rz-6 amino | gₛaₛgₛgₛaa cUGAUGaggccguuaggccGaa Augaua B | 6294 |
| | | | | stab1 | | |
| 607 | UGUAUU C CCAUCC | 6063 | 19200 | HBV-607 Rz-6 amino | gₛgₛaₛuₛgg cUGAUGaggccguuaggccGaa Aauaca B | 6295 |
| | | | | stab1 | | |
| 697 | UUUGUU C AGUGGU | 6064 | 19207 | HBV-697 Rz-6 amino | aₛcₛcₛaₛcu cUGAUGaggccguuaggccGaa Aacaaa B | 6296 |
| | | | | stab1 | | |
| 1539 | UCUCUU U ACGCGG | 6065 | 19211 | HBV-1539 Rz-6 amino | cₛcₛgₛcₛgu cUGAUGaggccguuaggccGaa Aagaga B | 6297 |
| | | | | stab1 | | |
| 1599 | UCACCU C UGCACG | 6066 | 19212 | HBV-1599 Rz-6 amino | cₛgₛuₛgₛca cUGAUGaggccguuaggccGaa Agguga B | 6298 |
| | | | | stab1 | | |
| 1607 | GCACGU C GCAUGG | 6067 | 19213 | HBV-1607 Rz-6 amino | cₛcₛaₛuₛgc cUGAUGaggccguuaggccGaa Acgugc B | 6299 |
| | | | | stab1 | | |
| 1833 | UCACCU C UGCCUA | 6068 | 19216 | HBV-1833 Rz-6 amino | uₛaₛgₛgₛca cUGAUGaggccguuaggccGaa Agguga B | 6300 |
| | | | | stab1 | | |
| 2383 | AGAACU C CCUCGC | 6069 | 19219 | HBV-2383 Rz-6 amino | gₛcₛgₛaₛgg cUGAUGaggccguuaggccGaa Aguucu B | 6301 |
| | | | | stab1 | | |
| 2429 | GAAGAU C UCAAUC | 6070 | 19221 | HBV-2429 Rz-6 amino | gₛaₛuₛuₛga cUGAUGaggccguuaggccGaa Aucuuc B | 6302 |
| | | | | stab1 | | |
| 2831 | UAUUCU U GGGAAC | 6071 | 19224 | HBV-2831 Rz-6 amino | gₛuₛuₛcₛcc cUGAUGaggccguuaggccGaa Agaaua B | 6303 |
| | | | | stab1 | | |
| 430 | UGCCUC A UCUUCU | 6072 | 19236 | HBV-430 CHz-6 amino | aₛgₛaₛaₛga cUGAUGaggccguuaggccGaa Iaggca B | 6304 |
| | | | | stab1 | | |
| 676 | UGGCUC A GUUUAC | 6073 | 19241 | HBV-676 CHz-6 amino | gₛuₛaₛaₛac cUGAUGaggccguuaggccGaa Iagcca B | 6305 |
| | | | | stab1 | | |
| 683 | GUUUAC U AGUGCC | 6074 | 19242 | HBV-683 CHz-6 amino | gₛgₛcₛaₛcu cUGAUGaggccguuaggccGaa Iuaaac B | 6306 |
| | | | | stab1 | | |
| 1150 | UUUACC C CGUUGC | 6075 | 19247 | HBV-1150 CHz-6 | gₛcₛaₛaₛcg cUGAUGaggccguuaggccGaa Iguaaa B | 6307 |
| | | | | amino stab1 | | |
| 1200 | GCAACC C CCACUG | 6076 | 19248 | HBV-1200 CHz-6 | cₛaₛgₛuₛgg cUGAUGaggccguuaggccGaa Iguugc B | 6308 |
| | | | | amino stab1 | | |
| 1201 | CAACCC C CACUGG | 6077 | 19249 | HBV-1201 CHz-6 | cₛcₛaₛgₛug cUGAUGaggccguuaggccGaa Igguug B | 6309 |
| | | | | amino stab1 | | |
| 1444 | CGGCGC U GAAUCC | 6078 | 19250 | HBV-1444 CHz-6 | gₛgₛaₛuₛuc cUGAUGaggccguuaggccGaa Icgccg B | 6310 |
| | | | | amino stab1 | | |
| 1451 | GAAUCC C GCGGAC | 6079 | 19251 | HBV-1451 CHz-6 | gₛuₛcₛcₛgc cUGAUGaggccguuaggccGaa Igauuc B | 6311 |
| | | | | amino stab1 | | |
| 1533 | CGCACC U CUCUUU | 6080 | 19252 | HBV-1533 CHz-6 | aₛaₛaₛgₛag cUGAUGaggccguuaggccGaa Igugcg B | 6312 |
| | | | | amino stab1 | | |
| 1600 | CACCUC U GCACGU | 6081 | 19255 | HBV-1600 CHz-6 | aₛcₛgₛuₛgc cUGAUGaggccguuaggccGaa Iaggug B | 6313 |
| | | | | amino stab1 | | |
| 1698 | CCGACC U UGAGGC | 6082 | 19256 | HBV-1698 CHz-6 | gₛcₛcₛuₛca cUGAUGaggccguuaggccGaa Igucgg B | 6314 |
| | | | | amino stab1 | | |
| 1784 | GGAGGC U GUAGGC | 6083 | 19257 | HBV-1784 CHz-6 | gₛcₛcₛuₛac cUGAUGaggccguuaggccGaa Iccucc B | 6315 |
| | | | | amino stab1 | | |
| 1829 | UUUUUC A CCUCUG | 6084 | 19259 | HBV-1829 CHz-6 | cₛaₛgₛaₛgg cUGAUGaggccguuaggccGaa Iaaaaa B | 6316 |
| | | | | amino stab1 | | |
| 1876 | GCCUCC A AGCUGU | 6085 | 19265 | HBV-1876 CHz-6 | aₛcₛaₛgₛcu cUGAUGaggccguuaggccGaa Igaggc B | 6317 |
| | | | | amino stab1 | | |
| 1880 | CCAAGC U GUGCCU | 6086 | 19267 | HBV-1880 CHz-6 | aₛgₛgₛcₛac cUGAUGaggccguuaggccGaa Icuugg B | 6318 |
| | | | | amino stab1 | | |
| 218 | UUUUUCU U GUUGACA | 6087 | 19178 | HBV-218 Rz-7 amino | uₛgₛuₛcₛaac cUGAUGaggccguuaggccGaa Agaaaaa B | 6319 |
| | | | | stab1 | | |
| 257 | CUAGACU C GUGGUGG | 6088 | 19181 | HBV-257 Rz-7 amino | cₛcₛaₛcₛcac cUGAUGaggccguuaggccGaa Agucuag B | 6320 |
| | | | | stab1 | | |
| 268 | GUGGACU U CUCUCAA | 6089 | 19183 | HBV-268 Rz-7 amino | uₛuₛgₛaₛgag cUGAUGaggccguuaggccGaa Aguccac B | 6321 |
| | | | | stab1 | | |
| 269 | UGGACUU C UCUCAAU | 6090 | 19184 | HBV-269 Rz-7 amino | aₛuₛuₛgₛaga cUGAUGaggccguuaggccGaa Aagucca B | 6322 |
| | | | | stab1 | | |
| 271 | GACUUCU C UCAAUUU | 6091 | 19185 | HBV-271 Rz-7 amino | aₛaₛaₛuₛuga cUGAUGaggccguuaggccGaa Agaaguc B | 6323 |
| | | | | stab1 | | |
| 273 | CUUCUCU C AAUUUUC | 6092 | 19186 | HBV-273 Rz-7 amino | gₛaₛaₛaₛauu cUGAUGaggccguuaggccGaa Agagaag B | 6324 |
| | | | | stab1 | | |
| 277 | UCUCAAU U UUCUAGG | 6093 | 19187 | HBV-277 Rz-7 amino | cₛcₛuₛaₛgaa cUGAUGaggccguuaggccGaa Auugaga B | 6325 |
| | | | | stab1 | | |
| 278 | CUCAAUU U UCUAGGG | 6094 | 19188 | HBV-278 Rz-7 amino | cₛcₛcₛuₛaga cUGAUGaggccguuaggccGaa Aauugag B | 6326 |
| | | | | stab1 | | |
| 279 | UCAAUUU U CUAGGGG | 6095 | 19189 | HBV-279 Rz-7 amino | cₛcₛcₛcₛuag cUGAUGaggccguuaggccGaa Aaauuga B | 6327 |
| | | | | stab1 | | |
| 314 | CAAAAUU C GCAGUCC | 6096 | 19192 | HBV-314 Rz-7 amino | gₛgₛaₛcₛugc cUGAUGaggccguuaggccGaa Aauuuug B | 6328 |
| | | | | stab1 | | |
| 385 | GAUGUGU C UGCGGCG | 6097 | 19193 | HBV-385 Rz-7 amino | cₛgₛcₛcₛgca cUGAUGaggccguuaggccGaa Acacauc B | 6329 |
| | | | | stab1 | | |
| 394 | GCGGCGU U UUAUCAU | 6098 | 19194 | HBV-394 Rz-7 amino | aₛuₛgₛaₛuaa cUGAUGaggccguuaggccGaa Acgccgc B | 6330 |
| | | | | stab1 | | |
| 402 | UUAUCAU C UUCCUCU | 6099 | 19197 | HBV-402 Rz-7 amino | aₛgₛaₛgₛgaa cUGAUGaggccguuaggccGaa Augauaa B | 6331 |
| | | | | stab1 | | |
| 423 | UGCUGCU A UGCCUCA | 6100 | 19198 | HBV-423 Rz-7 amino | uₛgₛaₛgₛgca cUGAUGaggccguuaggccGaa Agcagca B | 6332 |
| | | | | stab1 | | |
| 429 | UAUGCCU C AUCUUCU | 6101 | 19199 | HBV-429 Rz-7 amino | aₛgₛaₛaₛgau cUGAUGaggccguuaggccGaa Aggcaua B | 6333 |
| | | | | stab1 | | |
| 679 | GCUCAGU U UACUAGU | 6102 | 19201 | HBV-679 Rz-7 amino | aₛcₛuₛaₛgua cUGAUGaggccguuaggccGaa Acugagc B | 6334 |
| | | | | stab1 | | |
| 680 | CUCAGUU U ACUAGUG | 6103 | 19202 | HBV-680 Rz-7 amino | cₛaₛcₛuₛagu cUGAUGaggccguuaggccGaa Aacugag B | 6335 |
| | | | | stab1 | | |
| 681 | UCAGUUU A CUAGUGC | 6104 | 19203 | HBV-681 Rz-7 amino | gₛcₛaₛcₛuag cUGAUGaggccguuaggccGaa Aaacuga B | 6336 |
| | | | | stab1 | | |
| 684 | GUUUACU A GUGCCAU | 6105 | 19204 | HBV-684 Rz-7 amino | aₛuₛgₛgₛcac cUGAUGaggccguuaggccGaa Aguaaac B | 6337 |
| | | | | stab1 | | |
| 692 | GUGCCAU U UGUUCAG | 6106 | 19205 | HBV-692 Rz-7 amino | cₛuₛgₛaₛaca cUGAUGaggccguuaggccGaa Auggcac B | 6338 |
| | | | | stab1 | | |
| 693 | UGCCAUU U GUUCAGU | 6107 | 19206 | HBV-693 Rz-7 amino | aₛcₛuₛgₛaac cUGAUGaggccguuaggccGaa Aauggca B | 6339 |
| | | | | stab1 | | |
| 1534 | CGCACCU C UCUUUAC | 6108 | 19208 | HBV-1534 Rz-7 amino | gₛuₛaₛaₛaga cUGAUGaggccguuaggccGaa Aggugcg B | 6340 |
| | | | | stab1 | | |
| 1536 | CACCUCU C UUUACGC | 6109 | 19209 | HBV-1536 Rz-7 amino | gₛcₛgₛuₛaaa cUGAUGaggccguuaggccGaa Agaggug B | 6341 |
| | | | | stab1 | | |
| 1538 | CCUCUCU U UACGCGG | 6110 | 19210 | HBV-1538 Rz-7 amino | cₛcₛgₛcₛgua cUGAUGaggccguuaggccGaa Agagagg B | 6342 |
| | | | | stab1 | | |
| 1787 | AGGCUGU A GGCAUAA | 6111 | 19214 | HBV-1787 Rz-7 amino | uₛuₛaₛuₛgcc cUGAUGaggccguuaggccGaa Acagccu B | 6343 |
| | | | | stab1 | | |
| 1793 | UAGGCAU A AAUUGGU | 6112 | 19215 | HBV-1793 Rz-7 amino | aₛcₛcₛaₛauu cUGAUGaggccguuaggccGaa Augccua B | 6344 |
| | | | | stab1 | | |
| 1874 | CAAGCCU C CAAGCUG | 6113 | 19217 | HBV-1874 Rz-7 amino | cₛaₛgₛcₛuug cUGAUGaggccguuaggccGaa Aggcuug B | 6345 |
| | | | | stab1 | | |
| 1887 | UGUGCCU U GGGUGGC | 6114 | 19218 | HBV-1887 Rz-7 amino | gₛcₛcₛaₛccc cUGAUGaggccguuaggccGaa Aggcaca B | 6346 |
| | | | | stab1 | | |
| 2383 | AAGAACU C CCUCGCC | 6115 | 19220 | HBV-2383 Rz-7 amino | gₛgₛcₛgₛagg cUGAUGaggccguuaggccGaa Aguucuu B | 6347 |
| | | | | stab1 | | |
| 2828 | ACCAUAU U CUUGGGA | 6116 | 19222 | HBV-2828 Rz-7 amino | uₛcₛcₛcₛaag cUGAUGaggccguuaggccGaa Auauggu B | 6348 |
| | | | | stab1 | | |
| 2829 | CCAUAUU C UUGGGAA | 6117 | 19223 | HBV-2829 Rz-7 amino | uₛuₛcₛcₛcaa cUGAUGaggccguuaggccGaa Aauaugg B | 6349 |
| | | | | stab1 | | |
| 2831 | AUAUUCU U GGGAACA | 6118 | 19225 | HBV-2831 Rz-7 amino | uₛgₛuₛuₛccc cUGAUGaggccguuaggccGaa Agaauau B | 6350 |
| | | | | stab1 | | |
| 256 | UCUAGAC U CGUGGUG | 6119 | 19226 | HBV-256 CHz-7 amino | cₛaₛcₛcₛacg cUGAUGaggccguuaggccGaa Iucuaga B | 6351 |
| | | | | stab1 | | |
| 267 | GGUGGAC U UCUCUCA | 6120 | 19227 | HBV-267 CHz-7 amino | uₛgₛaₛgₛaga cUGAUGaggccguuaggccGaa Iuccacc B | 6352 |
| | | | | stab1 | | |
| 270 | GGACUUC U CUCAAUU | 6121 | 19228 | HBV-270 CHz-7 amino | aₛaₛuₛuₛgag cUGAUGaggccguuaggccGaa Iaagucc B | 6353 |
| | | | | stab1 | | |
| 272 | ACUUCUC U CAAUUUU | 6122 | 19229 | HBV-272 CHz-7 amino | aₛaₛaₛaₛuug cUGAUGaggccguuaggccGaa Iagaagu B | 6354 |
| | | | | stab1 | | |
| 274 | UUCUCUC A AUUUUCU | 6123 | 19230 | HBV-274 CHz-7 amino | aₛgₛaₛaₛaau cUGAUGaggccguuaggccGaa Iagagaa B | 6355 |
| | | | | stab1 | | |
| 386 | AUGUGUC U GCGGCGU | 6124 | 19231 | HBV-386 CHz-7 amino | aₛcₛgₛcₛcgc cUGAUGaggccguuaggccGaa Iacacau B | 6356 |
| | | | | stab1 | | |
| 419 | AUCCUGC U GCUAUGC | 6125 | 19232 | HBV-419 CHz-7 amino | gₛcₛaₛuₛagc cUGAUGaggccguuaggccGaa Icaggau B | 6357 |
| | | | | stab1 | | |
| 422 | CUGCUGC U AUGCCUC | 6126 | 19233 | HBV-422 CHz-7 amino | gₛaₛgₛgₛcau cUGAUGaggccguuaggccGaa Icagcag B | 6358 |
| | | | | stab1 | | |
| 427 | GCUAUGC C UCAUCUU | 6127 | 19234 | HBV-427 CHz-7 amino | aₛaₛgₛaₛuga cUGAUGaggccguuaggccGaa Icauagc B | 6359 |
| | | | | stab1 | | |
| 428 | CUAUGCC U CAUCUUC | 6128 | 19235 | HBV-428 CHz-7 amino | gₛaₛaₛgₛaug cUGAUGaggccguuaggccGaa Igcauag B | 6360 |
| | | | | stab1 | | |
| 430 | AUGCCUC A UCUUCUU | 6129 | 19237 | HBV-430 CHz-7 amino | aₛaₛgₛaₛaga cUGAUGaggccguuaggccGaa Iaggcau B | 6361 |
| | | | | stab1 | | |
| 608 | UGUAUUC C CAUCCCA | 6130 | 19238 | HBV-608 CHz-7 amino | uₛgₛgₛgₛaug cUGAUGaggccguuaggccGaa Iaauaca B | 6362 |
| | | | | stab1 | | |
| 609 | GUAUUCC C AUCCCAU | 6131 | 19239 | HBV-609 CHz-7 amino | aₛuₛgₛgₛgau cUGAUGaggccguuaggccGaa Igaauac B | 6363 |
| | | | | stab1 | | |
| 669 | GUUUCUC U UGGCUCA | 6132 | 19240 | HBV-669 CHz-7 amino | uₛgₛaₛgₛcca cUGAUGaggccguuaggccGaa Iagaaac B | 6364 |
| | | | | stab1 | | |
| 689 | CUAGUGC C AUUUGUU | 6133 | 19243 | HBV-689 CHz-7 amino | aₛaₛcₛaₛaau cUGAUGaggccguuaggccGaa Icacuag B | 6365 |
| | | | | stab1 | | |
| 690 | UAGUGCC A UUUGUUC | 6134 | 19244 | HBV-690 CHz-7 amino | gₛaₛaₛcₛaaa cUGAUGaggccguuaggccGaa Igcacua B | 6366 |
| | | | | stab1 | | |
| 718 | GCUUUCC C CCACUGU | 6135 | 19245 | HBV-718 CHz-7 amino | aₛcₛaₛgₛugg cUGAUGaggccguuaggccGaa Igaaagc B | 6367 |
| | | | | stab1 | | |
| 1149 | CCUUUAC C CCGUUGC | 6136 | 19246 | HBV-1149 CHz-7 | gₛcₛaₛaₛcgg cUGAUGaggccguuaggccGaa Iuaaagg B | 6368 |
| | | | | amino stab1 | | |
| 1535 | GCACCUC U CUUUACG | 6137 | 19253 | HBV-1535 CHz-7 | cₛgₛuₛaₛaag cUGAUGaggccguuaggccGaa Iaggugc B | 6369 |
| | | | | amino stab1 | | |
| 1537 | ACCUCUC U UUACGCG | 6138 | 19254 | HBV-1537 CHz-7 | cₛgₛcₛgₛuaa cUGAUGaggccguuaggccGaa Iagaggu B | 6370 |
| | | | | amino stab1 | | |
| 1791 | UGUAGGC A UAAAUUG | 6139 | 19258 | HBV-1791 CHz-7 | cₛaₛaₛuₛuua cUGAUGaggccguuaggccGaa Iccuaca B | 6371 |
| | | | | amino stab1 | | |
| 1831 | UUUUCAC C UCUGCCU | 6140 | 19260 | HBV-1831 CHz-7 | aₛgₛgₛcₛaga cUGAUGaggccguuaggccGaa Iugaaaa B | 6372 |
| | | | | amino stab1 | | |
| 1832 | UUUCACC U CUGCCUA | 6141 | 19261 | HBV-1832 CHz-7 | uₛaₛgₛgₛcag cUGAUGaggccguuaggccGaa Igugaaa B | 6373 |
| | | | | amino stab1 | | |
| 1872 | UUCAAGC C UCCAAGC | 6142 | 19262 | HBV-1872 CHz-7 | gₛcₛuₛuₛgga cUGAUGaggccguuaggccGaa Icuugaa B | 6374 |
| | | | | amino stab1 | | |
| 1873 | UCAAGCC U CCAAGCU | 6143 | 19263 | HBV-1873 CHz-7 | aₛgₛcₛuₛugg cUGAUGaggccguuaggccGaa Igcuuga B | 6375 |
| | | | | amino stab1 | | |
| 1875 | AAGCCUC C AAGCUGU | 6144 | 19264 | HBV-1875 CHz-7 | aₛcₛaₛgₛcuu cUGAUGaggccguuaggccGaa Iaggcuu B | 6376 |
| | | | | amino stab1 | | |
| 1876 | AGCCUCC A AGCUGUG | 6145 | 19266 | HBV-1876 CHz-7 | cₛaₛcₛaₛgcu cUGAUGaggccguuaggccGaa Igaggcu B | 6377 |
| | | | | amino stab1 | | |
| 1880 | UCCAAGC U GUGCCUU | 6146 | 19268 | HBV-1880 CHz-7 | aₛaₛgₛgₛcac cUGAUGaggccguuaggccGaa Icuugga B | 6378 |
| | | | | amino stab1 | | |
| 2382 | GAAGAAC U CCCUCGC | 6147 | 19269 | HBV-2382 CHz-7 | gₛcₛgₛaₛggg cUGAUGaggccguuaggccGaa Iuucuuc B | 6379 |
| | | | | amino stab1 | | |
| 2384 | AGAACUC C CUCGCCU | 6148 | 19270 | HBV-2384 CHz-7 | aₛgₛgₛcₛgag cUGAUGaggccguuaggccGaa Iaguucu B | 6380 |
| | | | | amino stab1 | | |
| 2385 | GAACUCC C UCGCCUC | 6149 | 19271 | HBV-2385 CHz-7 | gₛaₛgₛgₛcga cUGAUGaggccguuaggccGaa Igaguuc B | 6381 |
| | | | | amino stab1 | | |
| 2422 | GCGUCGC A GAAGAUC | 6150 | 19272 | HBV-2422 CHz-7 | gₛaₛuₛcₛuuc cUGAUGaggccguuaggccGaa Icgacgc B | 6382 |
| | | | | amino stab1 | | |
| 2830 | CAUAUUC U UGGGAAC | 6151 | 19273 | HBV-2830 CHz-7 | gₛuₛuₛcₛcca cUGAUGaggccguuaggccGaa Iaauaug B | 6383 |
| | | | | amino stab1 | | |
| 315 | GCCAAAAUUC G CAGUC | 6152 | 20079 | HBV-315 GCl.Rz-5/10 | gₛaₛcₛg uGAUₛg gcauGcacuaugc gcg gaauuuuggc B | 6384 |
| | | | | stab2 | | |
| 381 | AUCGCUGGAU G UGUCU | 6153 | 20080 | HBV-381 GCl.Rz-5/10 | aₛgₛaₛa uGAUₛg gcauGcacuaugc gcg auccagcgau B | 6385 |
| | | | | stab2 | | |
| 476 | UUGCCCGUUU G UCCUC | 6154 | 20081 | HBV-476 GCl.Rz-5/10 | gₛaₛgₛa uGAUₛg gcauGcacuaugc gcg aaacgggcaa B | 6386 |
| | | | | stab2 | | |
| 694 | AGUGCCAUUU G UUCAG | 6155 | 20082 | HBV-694 GCl.Rz-5/10 | cₛuₛgₛa uGAUₛg gcauGcacuaugc gcg aaauggcacu B | 6387 |
| | | | | stab2 | | |
| 1265 | CUCCUCUGCC G AUCCA | 6156 | 20083 | HBV-1265 GCl.Rz- | uₛgₛgₛu uGAUₛg gcauGcacuaugc gcg ggcagaggag B | 6388 |
| | | | | 5/10 stab2 | | |
| 1601 | CUUCACCUCU G CACGU | 6157 | 20084 | HBV-1601 GCl.Rz- | aₛcₛgₛg uGAUₛg gcauGcacuaugc gcg agaggugaag B | 6389 |
| | | | | 5/10 stab2 | | |
| 1881 | CCUCCAAGCU G UGCCU | 6158 | 20085 | HBV-1881 GCl.Rz- | aₛgₛgₛa uGAUₛg gcauGcacuaugc gcg agcuuggagg B | 6390 |
| | | | | 5/10 stab2 | | |
| 1883 | UCCAAGCUGU G CCUUG | 6159 | 20086 | HBV-1883 GCl.Rz- | cₛaₛaₛg uGAUₛg gcauGcacuaugc gcg acagcuugga B | 6391 |
| | | | | 5/10 stab2 | | |
| 2388 | GAACUCCCUC G CCUCG | 6160 | 20087 | HBV-2388 GCl.Rz- | cₛgₛaₛg uGAUₛg gcauGcacuaugc gcg gagggaguuc B | 6392 |
| | | | | 5/10 stab2 | | |
| 381 | GCUGGAU G UGUCUGC | 6161 | 20091 | HBV-381 Zin.Rz-7 | gₛcₛaₛgₛaca GccgaaagGCGaGugaGGuCu auccagc B | 6393 |
| | | | | amino stab2 | | |
| 392 | CUGCGGC G UUUUAUC | 6162 | 20092 | HBV-392 Zin.Rz-7 | gₛaₛuₛaₛaaa GccgaaagGCGaGugaGGuCu gccgcag B | 6394 |
| | | | | amino stab2 | | |
| 420 | UCCUGCU G CUAUGCC | 6163 | 20093 | HBV-420 Zin.Rz-7 | gₛgₛcₛaₛuag GccgaaagGCGaGugaGGuCu agcagga B | 6395 |
| | | | | amino stab2 | | |
| 648 | UAUGGGA G UGGGCCU | 6164 | 20094 | HBV-648 Zin.Rz-7 | aₛgₛgₛcₛcca GccgaaagGCGaGugaGGuCu ucccaua B | 6396 |
| | | | | amino stab2 | | |
| 711 | UCGUAGG G CUUUCCC | 6165 | 20095 | HBV-711 Zin.Rz-7 | gₛgₛgₛaₛaag GccgaaagGCGaGugaGGuCu ccuacga B | 6397 |
| | | | | amino stab2 | | |
| 1262 | CUCCUCU G CCGAUCC | 6166 | 20096 | HBV-1262 Zin.Rz-7 | gₛgₛaₛuₛcgg GccgaaagGCGaGugaGGuCu agaggag B | 6398 |
| | | | | amino stab2 | | |
| 1835 | CACCUCU G CCUAAUC | 6167 | 20097 | HBV-1835 Zin.Rz-7 | gₛaₛuₛuₛagg GccgaaagGCGaGugaGGuCu agaggug B | 6399 |
| | | | | amino stab2 | | |
| 2388 | CUCCCUC G CCUCGCA | 6168 | 20098 | HBV-2388 Zin.Rz-7 | uₛgₛcₛgₛagg GccgaaagGCGaGugaGGuCu gagggag B | 6400 |
| | | | | amino stab2 | | |
| 192 | GACCCCU G CUCGUGU | 6169 | 20099 | HBV-192 Zin.Rz-7 | aₛcₛaₛcₛgag GccgaaagGCGaGugaGGuCu agggguc B | 6401 |
| | | | | amino stab2 | | |
| 198 | UGCUCGU G UUACAGG | 6170 | 20100 | HBV-198 Zin.Rz-7 | cₛcₛuₛgₛuaa GccgaaagGCGaGugaGGuCu acgagca B | 6402 |
| | | | | amino stab2 | | |
| 315 | AAAUUC G CAGUCC | 6171 | 20101 | HBV-315 Zin.Rz-7 | gₛgₛgₛaₛcug GccgaaagGCGaGugaGGuCu gaauuuu B | 6403 |
| | | | | amino stab2 | | |
| 383 | GGAUGU G UCUGCG | 6172 | 20102 | HBV-383 Zin.Rz-6 | cₛgₛcₛaₛga GccgaaagGCGaGugaGGuCu acaucc B | 6404 |
| | | | | amino stab2 | | |
| 383 | UGGAUGU G UCUGCGG | 6173 | 20103 | HBV-383 Zin.Rz-7 | cₛcₛgₛcₛaga GccgaaagGCGaGugaGGuCu acaucca B | 6405 |
| | | | | amino stab2 | | |
| 387 | GUGUCU G CGGCGU | 6174 | 20104 | HBV-387 Zin.Rz-6 | aₛcₛgₛcₛcg GccgaaagGCGaGugaGGuCu agacac B | 6406 |
| | | | | amino stab2 | | |
| 390 | GUCUGCG G CGUUUUA | 6175 | 20105 | HBV-390 Zin.Rz-7 | uₛaₛaₛaₛacg GccgaaagGCGaGugaGGuCu cgcagac B | 6407 |
| | | | | amino stab2 | | |
| 392 | UGCGGC G UUUUAU | 6176 | 20106 | HBV-392 Zin.Rz-6 | aₛuₛaₛaₛaa GccgaaagGCGaGugaGGuCu gccgca B | 6408 |
| | | | | amino stab2 | | |
| 425 | UGCUAU G CCUCAU | 6177 | 20107 | HBV-425 Zin.Rz-6 | aₛuₛgₛaₛgg GccgaaagGCGaGugaGGuCu auagca B | 6409 |
| | | | | amino stab2 | | |
| 425 | CUGCUAU G CCUCAUC | 6178 | 20108 | HBV-425 Zin.Rz-7 | gₛaₛuₛgₛagg GccgaaagGCGaGugaGGuCu auagcag B | 6410 |
| | | | | amino stab2 | | |
| 468 | GUAUGUU G CCCGUUU | 6179 | 20109 | HBV-468 Zin.Rz-7 | aₛaₛaₛcₛagg GccgaaagGCGaGugaGGuCu aacauac B | 6411 |
| | | | | amino stab2 | | |
| 476 | CCCGUUU G UCCUCUA | 6180 | 20110 | HBV-476 Zin.Rz-7 | uₛaₛgₛaₛgga GccgaaagGCGaGugaGGuCu aaacggg B | 6412 |
| | | | | amino stab2 | | |
| 648 | AUGGGA G UGGGCC | 6181 | 20111 | HBV-648 Zin.Rz-6 | gₛgₛcₛcₛca GccgaaagGCGaGugaGGuCu ucccau B | 6413 |
| | | | | amino stab2 | | |
| 694 | GCCAUUU G UUCAGUG | 6182 | 20112 | HBV-694 Zin.Rz-7 | cₛaₛcₛuₛgaa GccgaaagGCGaGugaGGuCu aaauggc B | 6414 |
| | | | | amino stab2 | | |
| 699 | UUGUUCA G UGGUUCG | 6183 | 20113 | HBV-699 Zin.Rz-7 | cₛgₛaₛaₛcca GccgaaagGCGaGugaGGuCu ugaacaa B | 6415 |
| | | | | amino stab2 | | |
| 1262 | UCCUCU G CCGAUC | 6184 | 20114 | HBV-1262 Zin.Rz-6 | gₛaₛuₛcₛgg GccgaaagGCGaGugaGGuCu agagga B | 6416 |
| | | | | amino stab2 | | |
| 1440 | CCCGUCG G CGCUGAA | 6185 | 20115 | HBV-1440 Zin.Rz-7 | uₛuₛcₛaₛgcg GccgaaagGCGaGugaGGuCu cgacggg B | 6417 |
| | | | | amino stab2 | | |
| 1526 | CACGGG G CGCACC | 6186 | 20116 | HBV-1526 Zin.Rz-6 | gₛgₛuₛgₛcg GccgaaagGCGaGugaGGuCu cccgug B | 6418 |
| | | | | amino stab2 | | |
| 1526 | CCACGGG G CGCACCU | 6187 | 20117 | HBV-1526 Zin.Rz-7 | aₛgₛgₛuₛgcg GccgaaagGCGaGugaGGuCu cccgugg B | 6419 |
| | | | | amino stab2 | | |
| 1557 | CCCGUCU G UGCCUUC | 6188 | 20118 | HBV-1557 Zin.Rz-7 | gₛaₛaₛgₛgca GccgaaagGCGaGugaGGuCu agacggg B | 6420 |
| | | | | amino stab2 | | |
| 1559 | CGUCUGU G CCUUCUC | 6189 | 20119 | HBV-1559 Zin.Rz-7 | gₛaₛgₛaₛagg GccgaaagGCGaGugaGGuCu acagacg B | 6421 |
| | | | | amino stab2 | | |
| 1590 | GCACUUC G CUUCACC | 6190 | 20120 | HBV-1590 Zin.Rz-7 | gₛgₛuₛgₛaag GccgaaagGCGaGugaGGuCu gaagugc B | 6422 |
| | | | | amino stab2 | | |
| 1835 | ACCUCU G CCUAAU | 6191 | 20121 | HBV-1835 Zin.Rz-6 | aₛuₛuₛaₛgg GccgaaagGCGaGugaGGuCu agaggu B | 6423 |
| | | | | amino stab2 | | |
| 2311 | ACCAAAU G CCCCUAU | 6192 | 20122 | HBV-2311 Zin.Rz-7 | aₛuₛaₛgₛggg GccgaaagGCGaGugaGGuCu auuuggu B | 6424 |
| | | | | amino stab2 | | |
| 2420 | CCGCGUC G CAGAAGA | 6193 | 20123 | HBV-2420 Zin.Rz-7 | uₛcₛuₛuₛcug GccgaaagGCGaGugaGGuCu gacgcgg B | 6425 |
| | | | | amino stab2 | | |
| 65 | CCUGCUG G UGGCUCC | 6194 | 20124 | HBV-65 Zin.Rz-7 | gₛgₛaₛgₛcca GccgaaagGCGaGugaGGuCu cagcagg B | 6426 |
| | | | | amino stab2 | | |
| 192 | ACCCCU G CUCGUG | 6195 | 20125 | HBV-192 Zin.Rz-6 | cₛaₛcₛgₛag GccgaaagGCGaGugaGGuCu aggggu B | 6427 |
| | | | | amino stab2 | | |
| 198 | GCUCGU G UUACAG | 6196 | 20126 | HBV-198 Zin.Rz-6 | cₛuₛgₛuₛaa GccgaaagGCGaGugaGGuCu acgagc B | 6428 |
| | | | | amino stab2 | | |
| 258 | UAGACUC G UGGUGGA | 6197 | 20127 | HBV-258 Zin.Rz-7 | uₛcₛcₛaₛcca GccgaaagGCGaGugaGGuCu gagucua B | 6429 |
| | | | | amino stab2 | | |
| 261 | ACUCGUG G UGGACUU | 6198 | 20128 | HBV-261 Zin.Rz-7 | aₛaₛgₛuₛcca GccgaaagGCGaGugaGGuCu cacgagu B | 6430 |
| | | | | amino stab2 | | |
| 315 | AAAUUC G CAGUCC | 6199 | 20129 | HBV-315 Zin.Rz-6 | gₛgₛaₛcₛug GccgaaagGCGaGugaGGuCu gaauuu B | 6431 |
| | | | | amino stab2 | | |
| 381 | CUGGAU G UGUCUG | 6200 | 20130 | HBV-381 Zin.Rz-6 | cₛaₛgₛaₛca GccgaaagGCGaGugaGGuCu auccag B | 6432 |
| | | | | amino stab2 | | |
| 387 | UGUGUCU G CGGCGUU | 6201 | 20131 | HBV-387 Zin.Rz-7 | aₛaₛcₛgₛccg GccgaaagGCGaGugaGGuCu agacaca B | 6433 |
| | | | | amino stab2 | | |
| 390 | UCUGCG G CGUUUU | 6202 | 20132 | HBV-390 Zin.Rz-6 | aₛaₛaₛaₛcg GccgaaagGCGaGugaGGuCu cgcaga B | 6434 |
| | | | | amino stab2 | | |
| 417 | CAUCCU G CUGCUA | 6203 | 20133 | HBV-417 Zin.Rz-6 | uₛaₛgₛcₛag GccgaaagGCGaGugaGGuCu aggaug B | 6435 |
| | | | | amino stab2 | | |
| 420 | CCUGCU G CUAUGC | 6204 | 20134 | HBV-420 Zin.Rz-6 | gₛcₛaₛuₛag GccgaaagGCGaGugaGGuCu agcagg B | 6436 |
| | | | | amino stab2 | | |
| 468 | UAUGUU G CCCGUU | 6205 | 20135 | HBV-468 Zin.Rz-6 | aₛaₛcₛgₛgg GccgaaagGCGaGugaGGuCu aacaua B | 6437 |
| | | | | amino stab2 | | |
| 476 | CCGUUU G UCCUCU | 6206 | 20136 | HBV-476 Zin.Rz-6 | aₛgₛaₛgₛga GccgaaagGCGaGugaGGuCu aaacgg B | 6438 |
| | | | | amino stab2 | | |
| 677 | GGCUCA G UUUACU | 6207 | 20137 | HBV-677 Zin.Rz-6 | aₛgₛuₛaₛaa GccgaaagGCGaGugaGGuCu ugagcc B | 6439 |
| | | | | amino stab2 | | |
| 677 | UGGCUCA G UUUACUA | 6209 | 20138 | HBV-677 Zin.Rz-7 | uₛaₛgₛuₛaaa GccgaaagGCGaGugaGGuCu ugagoca B | 6440 |
| | | | | amino stab2 | | |
| 685 | UUACUA G UGCCAU | 6209 | 20139 | HBV-685 Zin.Rz-6 | aₛuₛgₛgₛca GccgaaagGCGaGugaGGuCu uaguaa B | 6441 |
| | | | | amino stab2 | | |
| 685 | UUUACUA G UGCCAUU | 6210 | 20140 | HBV-685 Zin.Rz-7 | aₛaₛuₛgₛgca GccgaaagGCGaGugaGGuCu uaguaaa B | 6442 |
| | | | | amino stab2 | | |
| 687 | UACUAGU G CCAUUUG | 6211 | 20141 | HBV-687 Zin.Rz-7 | cₛaₛaₛaₛugg GccgaaagGCGaGugaGGuCu acuagua B | 6443 |
| | | | | amino stab2 | | |
| 699 | UGUUCA G UGGUUC | 6212 | 20142 | HBV-699 Zin.Rz-6 | gₛaₛaₛcₛca GccgaaagGCGaGugaGGuCu ugaaca B | 6444 |
| | | | | amino stab2 | | |
| 702 | UCAGUG G UUCGUA | 6213 | 20143 | HBV-702 Zin.Rz-6 | uₛaₛcₛgₛaa GccgaaagGCGaGugaGGuCu cacuga B | 6445 |
| | | | | amino stab2 | | |
| 702 | UUCAGUG G UUCGUAG | 6214 | 20144 | HBV-702 Zin.Rz-7 | cₛuₛaₛcₛgaa GccgaaagGCGaGugaGGuCu cacugaa B | 6446 |
| | | | | amino stab2 | | |
| 711 | CGUAGG G CUUUCC | 6215 | 20145 | HBV-711 Zin.Rz-6 | gₛgₛaₛaₛag GccgaaagGCGaGugaGGuCu ccuacg B | 6447 |
| | | | | amino stab2 | | |
| 1006 | UUGUGG G UCUUUU | 6216 | 20146 | HBV-1006 Zin.Rz-6 | aₛaₛaₛaₛga GccgaaagGCGaGugaGGuCu ccacaa B | 6448 |
| | | | | amino stab2 | | |
| 1103 | UUUCUC G CCAACU | 6217 | 20147 | HBV-1103 Zin.Rz-6 | aₛgₛuₛuₛgg GccgaaagGCGaGugaGGuCu gagaaa B | 6449 |
| | | | | amino stab2 | | |
| 1103 | CUUUCUC G CCAACUU | 6218 | 20148 | HBV-1103 Zin.Rz-7 | aₛaₛgₛuₛugg GccgaaagGCGaGugaGGuCu gagaaag B | 6450 |
| | | | | amino stab2 | | |
| 1184 | GCCAAGU G UUUGCUG | 6219 | 20149 | HBV-1184 Zin.Rz-7 | cₛaₛgₛcₛaaa GccgaaagGCGaGugaGGuCu acuuggc B | 6451 |
| | | | | amino stab2 | | |
| 1440 | CCGUCG G CGCUGA | 6220 | 20150 | HBV-1440 Zin.Rz-6 | uₛcₛaₛgₛcg GccgaaagGCGaGugaGGuCu cgacgg B | 6452 |
| | | | | amino stab2 | | |
| 1442 | GUCGGC G CUGAAU | 6221 | 20151 | HBV-1442 Zin.Rz-6 | aₛuₛuₛcₛag GccgaaagGCGaGugaGGuCu gccgac B | 6453 |
| | | | | amino stab2 | | |
| 1442 | CGUCGGC G CUGAAUC | 6222 | 20152 | HBV-1442 Zin.Rz-7 | gₛaₛuₛuₛcag GccgaaagGCGaGugaGGuCu gccgacg B | 6454 |
| | | | | amino stab2 | | |
| 1553 | CUCCCC G UCUGUG | 6223 | 20153 | HBV-1553 Zin.Rz-6 | cₛaₛcₛaₛga GccgaaagGCGaGugaGGuCu ggggag B | 6455 |
| | | | | amino stab2 | | |
| 1557 | CCGUCU G UGCCUU | 6224 | 20154 | HBV-1557 Zin.Rz-6 | aₛaₛgₛgₛca GccgaaagGCGaGugaGGuCu agacgg B | 6456 |
| | | | | amino stab2 | | |
| 1559 | GUCUGU G CCUUCU | 6225 | 20155 | HBV-1559 Zin.Rz-6 | aₛgₛaₛaₛgg GccgaaagGCGaGugaGGuCu acagac B | 6457 |
| | | | | amino stab2 | | |
| 1583 | CCGUGU G CACUUC | 6226 | 20156 | HBV-1583 Zin.Rz-6 | gₛaₛaₛgₛug GccgaaagGCGaGugaGGuCu acacgg B | 6458 |
| | | | | amino stab2 | | |
| 1590 | CACUUC G CUUCAC | 6227 | 20157 | HBV-1590 Zin.Rz-6 | gₛuₛgₛaₛag GccgaaagGCGaGugaGGuCu gaagug B | 6459 |
| | | | | amino stab2 | | |
| 1622 | ACCACC G UGAACG | 6228 | 20158 | HBV-1622 Zin.Rz-6 | cₛgₛuₛᵤsca GccgaaagGCGaGugaGGuCu gguggu B | 6460 |
| | | | | amino stab2 | | |
| 1870 | UGUUCAA G CCUCCAA | 6229 | 20159 | HBV-1870 Zin.Rz-7 | uₛuₛgₛgₛagg GccgaaagGCGaGugaGGuCu uugaaca B | 6461 |
| | | | | amino stab2 | | |
| 1881 | CCAAGCU G UGCCUUG | 6230 | 20160 | HBV-1881 Zin.Rz-7 | cₛaₛaₛgₛgca GccgaaagGCGaGugaGGuCu agcuugg B | 6462 |
| | | | | amino stab2 | | |
| 1883 | AGCUGU G CCUUGG | 6231 | 20161 | HBV-1883 Zin.Rz-6 | cₛcₛaₛaₛgg GccgaaagGCGaGugaGGuCu acagcu B | 6463 |
| | | | | amino stab2 | | |
| 1883 | AAGCUGU G CCUUGGG | 6232 | 20162 | HBV-1883 Zin.Rz-7 | cₛcₛcₛaₛagg GccgaaagGCGaGugaGGuCu acagcuu B | 6464 |
| | | | | amino stab2 | | |
| 2311 | CCAAAU G CCCCUA | 6233 | 20163 | HBV-2311 Zin.Rz-6 | uₛaₛgₛgₛgg GccgaaagGCGaGugaGGuCu auuugg B | 6465 |
| | | | | amino stab2 | | |
| 2347 | ACUGUU G UUAGAC | 6234 | 20164 | HBV-2347 Zin.Rz-6 | gₛuₛcₛuₛaa GccgaaagGCGaGugaGGuCu aacagu B | 6466 |
| | | | | amino stab2 | | |
| 2364 | AGGCAG G UCCCCU | 6235 | 20165 | HBV-2364 Zin.Rz-6 | aₛgₛgₛgₛga GccgaaagGCGaGugaGGuCu cugccu B | 6467 |
| | | | | amino stab2 | | |
| 2364 | GAGGCAG G UCCCCUA | 6236 | 20166 | HBV-2364 Zin.Rz-7 | uₛaₛgₛgₛgga GccgaaagGCGaGugaGGuCu cugccuc B | 6468 |
| | | | | amino stab2 | | |
| 2388 | UCCUC G CCUCGC | 6237 | 20167 | HBV-2388 Zin.Rz-6 | gₛcₛgₛaₛgg GccgaaagGCGaGugaGGuCu gaggga B | 6469 |
| | | | | amino stab2 | | |
| 2393 | CGCCUC G CAGACG | 6238 | 20168 | HBV-2393 Zin.Rz-6 | cₛgₛuₛcₛug GccgaaagGCGaGugaGGuCu gaggcg B | 6470 |
| | | | | amino stab2 | | |
| 2417 | CGCCGC G UCGCAG | 6239 | 20169 | HBV-2417 Zin.Rz-6 | cₛuₛgₛcₛga GccgaaagGCGaGugaGGuCu gcggcg B | 6471 |
| | | | | amino stab2 | | |
| 2420 | CGCGUC G CAGAAG | 6240 | 20170 | HBV-2420 Zin.Rz-6 | cₛuₛuₛcₛug GccgaaagGCGaGugaGGuCu gacgcg B | 6472 |
| | | | | amino stab2 | | |
| 2474 | CAUAAG G UGGGAA | 6241 | 20171 | HBV-2474 Zin.Rz-6 | uₛuₛcₛcₛca GccgaaagGCGaGugaGGuCu cuuaug B | 6473 |
| | | | | amino stab2 | | |
| 381 | GCUGGAU G UGUCUGC | 6242 | 20172 | HBV-381 Amb.Rz-7 | gₛcₛaₛgₛaca gga L ucCCUUCaagga L ucCGGG | 6474 |
| | | | | stab2 | auccagc B | |
| 648 | UAUGGGA G UGGGCCU | 6243 | 20173 | HBV-648 Amb.Rz-7 | aₛgₛgₛcₛcca gga L ucCCUUCaagga L ucCGGG | 6475 |
| | | | | stab2 | ucccaua B | |
| 198 | UGCUCGU G UUACAGG | 6244 | 20174 | HBV-198 Amb.Rz-7 | cₛcₛuₛgₛuaa gga L ucCCUUCaagga L ucCGGG | 6476 |
| | | | | stab2 | acgagca B | |
| 377 | UAUCGCU G GAUGUGU | 6245 | 20175 | HBV-377 Amb.Rz-7 | aₛcₛaₛcₛauc gga L ucCCUUCaagga L ucCGGG | 6477 |
| | | | | stab2 | agcgaua B | |
| 378 | AUCGCUG G AUGUGUC | 6246 | 20176 | HBV-378 Amb.Rz-7 | gₛaₛcₛaₛcau gga L ucCCUUCaagga L ucCGGG | 6478 |
| | | | | stab2 | cagcgau B | |
| 383 | UGGAUGU G UCUGCGG | 6247 | 20177 | HBV-383 Amb.Rz-7 | cₛcₛgₛcₛaga gga L ucCCUUCaagga L ucCGGG | 6479 |
| | | | | stab2 | acaucca B | |
| 383 | GGAUGU G UCUGCG | 6248 | 20178 | HBV-383 Amb.Rz-6 | cₛgₛcₛaₛga gga L ucCCUUCaagga L ucCGGG | 6480 |
| | | | | stab2 | acaucc B | |
| 648 | AUGGGA G UGGGCC | 6249 | 20179 | HBV-648 Amb.Rz-6 | gₛgₛcₛcₛca gga L ucCCUUCaagga L ucCGGG | 6481 |
| | | | | stab2 | ucccau B | |
| 650 | UGGGAGU G GGCCUCA | 6250 | 20180 | HBV-650 Amb.Rz-7 | uₛgₛaₛgₛgcc gga L ucCCUUCaagga L ucCGGG | 6482 |
| | | | | stab2 | acuccca B | |
| 650 | GGGAGU G GGCCUC | 6251 | 20181 | HBV-650 Amb.Rz-6 | gₛaₛgₛgₛcc gga L ucCCUUCaagga L ucCGGG | 6483 |
| | | | | stab2 | acuccc B | |
| 694 | GCCAUUU G UUCAGUG | 6252 | 20182 | HBV-694 Amb.Rz-7 | cₛaₛcₛuₛgaa gga L ucCCUUCaagga L ucCGGG | 6484 |
| | | | | stab2 | aaauggc B | |
| 699 | UUGUUCA G UGGUUCG | 6253 | 20183 | HBV-699 Amb.Rz-7 | cₛgₛaₛaₛcca gga L ucCCUUCaagga L ucCGGG | 6485 |
| | | | | stab2 | ugaacaa B | |
| 701 | GUUCAGU G GUUCGUA | 6254 | 20184 | HBV-701 Amb.Rz-7 | uₛaₛcₛgₛaac gga L ucCCUUCaagga L ucCGGG | 6486 |
| | | | | stab2 | acugaac B | |
| 710 | UUCGUAG G GCUUUCC | 6255 | 20185 | HBV-710 Amb.Rz-7 | gₛgₛaₛaₛagc gga L ucCCUUCaagga L ucCGGG | 6487 |
| | | | | stab2 | cuacgaa B | |
| 1525 | CCACGG G GCGCAC | 6256 | 20186 | HBV-1525 Amb.Rz-6 | gₛuₛgₛcₛgc gga L ucCCUUCaagga L ucCGGG | 6488 |
| | | | | stab2 | ccgugg B | |
| 1624 | CACCGU G AACGCC | 6257 | 20187 | HBV-1624 Amb.Rz-6 | gₛgₛcₛgₛuu gga L ucCCUUCaagga L ucCGGG | 6489 |
| | | | | stab2 | acggug B | |
| 2069 | CACUCA G GCAAGC | 6258 | 20188 | HBV-2069 Amb.Rz-6 | gₛcₛuₛuₛgc gga L ucCCUUCaagga L ucCGGG | 6490 |
| | | | | stab2 | ugagug B | |
| 2375 | CCUAGAA G AAGAACU | 6259 | 20189 | HBV-2375 Amb.Rz-7 | aₛgₛuₛuₛcuu gga L ucCCUUCaagga L ucCGGG | 6491 |
| | | | | stab2 | uucuagg B | |
| 2476 | AUAAGGU G GGAAACU | 6260 | 20190 | HBV-2476 Amb.Rz-7 | aₛgₛuₛuₛucc gga L ucCCUUCaagga L ucCGGG | 6492 |
| | | | | stab2 | accuuau B | |
| 65 | CCUGCUG G UGGCUCC | 6261 | 20191 | HBV-65 Amb.Rz-7 | gₛgₛaₛgₛcca gga L ucCCUUCaagga L ucCGGG | 6493 |
| | | | | stab2 | cagcagg B | |
| 67 | GCUGGU G GCUCCA | 6262 | 20192 | HBV-67 Amb.Rz-6 | uₛgₛgₛaₛgc gga L ucCCUUCaagga L ucCGGG | 6494 |
| | | | | stab2 | accagc B | |
| 198 | GCUCGU G UUACAG | 6263 | 20193 | HBV-198 Amb.Rz-6 | cₛuₛgₛuₛaa gga L ucCCUUCaagga L ucCGGG | 6495 |
| | | | | stab2 | acgagc B | |
| 260 | GACUCGU G GUGGACU | 6264 | 20194 | HBV-260 Amb.Rz-7 | aₛgₛuₛcₛcac gga L ucCCUUCaagga L ucCGGG | 6496 |
| | | | | stab2 | acgaguc B | |
| 263 | UCGUGGU G GACUUCU | 6265 | 20195 | HBV-263 Amb.Rz-7 | aₛgₛaₛaₛguc gga L ucCCUUCaagga L ucCGGG | 6497 |
| | | | | stab2 | B | |
| 377 | AUCGCU G GAUGUG | 6266 | 20196 | HBV-377 Amb.Rz-6 | cₛaₛcₛaₛuc gga L ucCCUUCaagga L ucCGGG | 6498 |
| | | | | stab2 | agcgau B | |
| 378 | UCGCUG G AUGUGU | 6267 | 20197 | HBV-378 Amb.Rz-6 | aₛcₛaₛcₛau gga L ucCCUUCaagga L ucCGGG | 6499 |
| | | | | stab2 | cagcga B | |
| 476 | CCGUUU G UCCUCU | 6268 | 20198 | HBV-476 Amb.Rz-6 | aₛgₛaₛgₛga gga L ucCCUUCaagga L ucCGGG | 6500 |
| | | | | stab2 | aaacgg B | |
| 651 | GGGAGUG G GCCUCAG | 6269 | 20199 | HBV-651 Amb.Rz-7 | cₛuₛgₛaₛggc gga L ucCCUUCaagga L ucCGGG | 6501 |
| | | | | stab2 | cacuccc B | |
| 677 | UGGCUCA G UUUACUA | 6270 | 20200 | HBV-677 Amb.Rz-7 | uₛaₛgₛuₛaaa gga L ucCCUUCaagga L ucCGGG | 6502 |
| | | | | stab2 | ugagcca B | |
| 685 | UUUACUA G UGCCAUU | 6271 | 20201 | HBV-685 Amb.Rz-7 | aₛaₛuₛgₛgca gga L ucCCUUCaagga L ucCGGG | 6503 |
| | | | | stab2 | uaguaaa B | |
| 702 | UUCAGUG G UUCGUAG | 6272 | 20202 | HBV-702 Amb.Rz-7 | cₛuₛaₛcₛgaa gga L ucCCUUCaagga L ucCGGG | 6504 |
| | | | | stab2 | cacugaa B | |
| 709 | GUUCGUA G GGCUUUC | 6273 | 20203 | HBV-709 Amb.Rz-7 | gₛaₛaₛaₛgcc gga L ucCCUUCaagga L ucCGGG | 6505 |
| | | | | stab2 | uacgaac B | |
| 710 | UCGUAG G GCUUUC | 6274 | 20204 | HBV-710 Amb.Rz-6 | gₛaₛaₛaₛgc gga L ucCCUUCaagga L ucCGGG | 6506 |
| | | | | stab2 | cuacga B | |
| 747 | UAUGGAU G AUGUGGU | 6275 | 20205 | HBV-747 Amb.Rz-7 | aₛcₛcₛaₛcau gga L ucCCUUCaagga L ucCGGG | 6507 |
| | | | | stab2 | auccaua B | |
| 1557 | CCGUCU G UGCCUU | 6276 | 20206 | HBV-1557 Amb.Rz-6 | aₛaₛgₛgₛca gga L ucCCUUCaagga L ucCGGG | 6508 |
| | | | | stab2 | agacgg B | |
| 1881 | CCAAGCU G UGCCUUG | 6277 | 20207 | HBV-1881 Amb.Rz-7 | cₛaₛaₛgₛgca gga L ucCCUUCaagga L ucCGGG | 6509 |
| | | | | stab2 | agcuugg B | |
| 2347 | ACUGUU G UUAGAC | 6278 | 20208 | HBV-2347 Amb.Rz-6 | gₛuₛcₛuₛaa gga L ucCCUUCaagga L ucCGGG | 6510 |
| | | | | stab2 | aacagu B | |
| 2375 | CUAGAA G AAGAAC | 6279 | 20209 | HBV-2375 Amb.Rz-6 | gₛuₛuₛcₛuu gga L ucCCUUCaagga L ucCGGG | 6511 |
| | | | | stab2 | uucuag B | |
| 2378 | GAAGAA G AACUCC | 6280 | 20210 | HBV-2378 Amb.Rz-6 | gₛgₛaₛgₛuu gga L ucCCUUCaagga L ucCGGG | 6512 |
| | | | | stab2 | uucuuc B | |
| 2423 | CGUCGCA G AAGAUCU | 6281 | 20211 | HBV-2423 Amb.Rz-7 | aₛgₛaₛuₛcuu gga L ucCCUUCaagga L ucCGGG | 6513 |
| | | | | stab2 | ugcgacg B | |
| 2426 | GCAGAA G AUCUCA | 6282 | 20212 | HBV-2426 Amb.Rz-6 | uₛgₛaₛgₛau gga L ucCCUUCaagga L ucCGGG | 6514 |
| | | | | stab2 | uucugc B | |
| 2426 | CGCAGAA G AUCUCAA | 6283 | 20213 | HBV-2426 Amb.Rz-7 | uₛuₛgₛaₛgau gga L ucCCUUCaagga L ucCGGG | 6515 |
| | | | | stab2 | uucugcg B | |
| 2476 | UAAGGU G GGAAAC | 6284 | 20214 | HBV-2476 Amb.Rz-6 | gₛuₛuₛuₛcc gga L ucCCUUCaagga L ucCGGG | 6516 |
| | | | | stab2 | accuua B | |
| 2477 | UAAGGUG G GAAACUU | 6285 | 20215 | HBV-2477 Amb.Rz-7 | aₛaₛgₛuₛuuc gga L ucCCUUCaagga L ucCGGG | 6517 |
| | | | | stab2 | caccuua B | |
| 2477 | AAGGUG G GAAACU | 6286 | 20216 | HBV-2477 Amb.Rz-6 | aₛgₛuₛuₛuc gga L ucCCUUCaagga L ucCGGG | 6518 |
| | | | | stab2 | caccuu B | |
| 1607 | UGCACGU G GCAUGGA | 6287 | 20697 | HBV-1607 Rz-7 allyl | uₛcₛcₛaₛugc cUGAuGaggccguuaggccGaa Acgugca B | 6519 |
| | | | | stab1 (7/4) | | |
| 1887 | GUGCCU G GGGUGG | 6288 | 20698 | HBV-1887 Rz-6 allyl | cₛcₛaₛcₛcc cUGAuGaggccguuaggccGaa Aggcac B | 6520 |
| | | | | stab1 (6/4) | | |
| 1607 | GCACGU G GCAUGG | 6289 | 20699 | HBV-1607 Rz-6 allyl | cₛcₛaₛuₛgc cUGAuGaggccguuaggccGaa Acgugc B | 6521 |
| | | | | stab1 (6/3) | | |
| 1607 | UGCACGU G GCAUGGA | 6290 | 20700 | HBV-1607 Rz-7 allyl | uₛcₛcₛaₛugc cUGAuGaggccguuaggccGaa Acgugca B | 6522 |
| | | | | stab1 (7/3) | | |
| 1887 | GUGCCU G GGGUGG | 6291 | 20701 | HBV-1887 Rz-6 allyl | cₛcₛaₛcₛcc cUGAuGaggccguuaggccGaa Aggcac B | 6523 |
| | | | | stab1 (6/3) | | |
| 1887 | UGUGCCU G GGGUGGC | 6292 | 20702 | HBV-1887 Rz-7 allyl | gₛcₛcₛaₛccc cUGAuGaggccguuaggccGaa Aggcaca B | 6524 |
| | | | | stab1 (7/3) | | |
| 313 | CCAAAAU G CGCAGUC | 5943 | 22798 | HBV-313 Rz-7 Ome | gacugcg CUGAUGAggccguuaggccGAA Auuuugg B | 6541 |
| | | | | stab1 | | |
| 408 | UCUUCCU G UGCAUCC | 5946 | 22799 | HBV-408 Rz-7 Ome | ggaugca CUGAUGAggccguuaggccGAA Aggaaga B | 6542 |
| | | | | stab1 | | |
| 1756 | AGGAGGU G AGGUUAA | 5950 | 22800 | HBV-1756 Rz-7 Ome | uuaaccu CUGAUGAggccguuaggccGAA Accuccu B | 6543 |
| | | | | stab1 | | |
| 10 | CUCCACC A CUUUCCA | 5953 | 22770 | HBV-10 CHz-7 Ome | uggaaag CUGAUGAggccguuaggccGAA Iguggag B | 6544 |
| | | | | stab1 | | |
| 335 | UCCAGUC A CUCACCA | 5954 | 22771 | HBV-335 CHz-7 Ome | uggugag CUGAUGAggccguuaggccGAA Iacugga B | 6545 |
| | | | | stab1 | | |
| 273 | CUUCUCU G AAUUUUC | 5996 | 22645 | HBV-273 Rz-7 allyl | gₛaₛaₛaₛauu cUGAuGagccguuaggcGaa Agagaag B | 6546 |
| | | | | stab1 (7/3-GUUA) | | |
| 273 | CUUCUCU G AAUUUUC | 5996 | 22648 | HBV-273 Rz-7 allyl | gₛaₛaₛaₛauu cUGAuGagccguuaggcGaa Agagaag B | 6547 |
| | | | | stab1 (7/3-GAAA) | | |
| 273 | CUUCUCU G AAUUUUC | 5996 | 22650 | HBV-273 Rz-7 allyl | gₛaₛaₛaₛauu cUGAuGagccguuaggcGaa Agagaag B | 6548 |
| | | | | stab1 (7/4-GAAA) | | |
| 273 | UUCUCU G AAUUUU | 6643 | 22644 | HBV-273 Rz-6 allyl | aₛaₛaₛaₛuu cUGAuGagccguuaggcGaa Agagaa B | 6549 |
| | | | | stab1 (6/3-GUUA) | | |
| 273 | UUCUCU C AAUUUU | 6643 | 22647 | HBV-273 RZ-6 allyl | aₛaₛaₛaₛuu cUGAuGagccgaaaggcGaa Agagaa B | 6550 |
| | | | | stab1 (6/3-GAAA) | | |
| 273 | UUCUCU C AAUUUU | 6643 | 22649 | HBV-273 Rz-6 allyl | aₛaₛaₛaₛuu cUGAuGagccguuaggcGaa Agagaa B | 6551 |
| | | | | stab1 (6/4-GAAA) | | |
| 350 | ACCUGUU G UCCUCCA | 6644 | 22714 | HBV-350 GCl.Rz-7 | uggagga uGAUg gcauGcacuaugc gCg aacaggu B | 6552 |
| | | | | 5ribo stab3 | | |
| 1253 | CCUUUGU G UCUCCUC | 6645 | 22715 | HBV-1 253 GCl.Rz-7 | gaggaga uGAUg gcauGcacuaugc gCg acaaagg B | 6553 |
| | | | | 5ribo stab3 | | |
| 1856 | UGUUCAU G UCCUACU | 6646 | 22716 | HBV-1 856 GCl.Rz-7 | aguagga uGAUg gcauGcacuaugc gCg augaaca B | 6554 |
| | | | | 5ribo stab3 | | |
| 1966 | GCCUUCU G ACUUCUU | 6647 | 22717 | HBV-1 966 GCl.Rz-7 | aagaagu uGAUg gcauGcacuaugc gCg agaaggc B | 6555 |
| | | | | 5ribo stab3 | | |
| 3132 | UCCUCCU G CCUCCAC | 6648 | 22718 | HBV-3132 GCl.Rz-7 | guggagg uGAUg gcauGcacuaugc gCg aggagga B | 6556 |
| | | | | 5ribo stab3 | | |
| 332 | AUCUCCA G UCACUCA | 6649 | 22742 | HBV-332 Zin.Rz-7 | ugaguga gccgaaaggCgagugaGGuCu uggagau B | 6557 |
| | | | | amino stab4 | | |
| 350 | ACCUGUU G UCCUCCA | 6644 | 22743 | HBV-350 Zin.Rz-7 | uggagga gccgaaaggCgagugaGGuCu aacaggu B | 6558 |
| | | | | amino stab4 | | |
| 410 | UUCCUCU G CAUCCUG | 6650 | 22744 | HBV-410 Zin.Rz-7 | caggaug gccgaaaggCgagugaGGuCu agaggaa B | 6559 |
| | | | | amino stab4 | | |
| 1253 | CCUUUGU G UCUCCUC | 6645 | 22745 | HBV-1253 Zin.Rz-7 | gaggaga gccgaaaggCgagugaGGuCu acaaagg B | 6560 |
| | | | | amino stab4 | | |
| 1754 | GGAGGAG G UUAGGUU | 6651 | 22746 | HBV-1754 Zin.Rz-7 | aaccuaa gccgaaaggCgagugaGGuCu cuccucc B | 6561 |
| | | | | amino stab4 | | |
| 407 | AUCUUCC U CUGCAUC | 6652 | 22772 | HBV-407 CHz-7 Ome | gaugcag CUGAUGAggccguuaggccGAA Igaagau B | 6562 |
| | | | | stab1 | | |
| 1848 | UCAUCUC A UGUUCAU | 6653 | 22773 | HBV-1848 CHz-7 Ome | augaaca CUGAUGAggccguuaggccGAA Iagauga B | 6563 |
| | | | | stab1 | | |
| 3124 | GCAGCUC C UCCUCCU | 6654 | 22774 | HBV-3124 CHz-7 Ome | aggagga CUGAUGAggccguuaggccGAA Iagcugc B | 6564 |
| | | | | stab1 | | |
| 2165 | GUCAGCU A UGUCAAC | 6655 | 22801 | HBV-2165 Rz-7 Ome | guugaca CUGAUGAggccguuaggccGAA Agcugac B | 6565 |
| | | | | stab1 | | |
| 2706 | CCGUAUU A UCCAGAG | 6656 | 22802 | HBV-2706 Rz-7 Ome | cucugga CUGAUGAggccguuaggccGAA Aauacgg B | 6566 |
| | | | | stab1 | | |
| 350 | ACCUGUU G UCCUCCA | 6644 | 22966 | HBV-350 Dz-7 stab3 | uggagga GGCTAGCTACAACGAaacaggu B | 6567 |
| 332 | AUCUCCA G UCACUCA | 6649 | 22967 | HBV-332 Dz-7 stab3 | ugaguga GGCTAGCTACAACGAuggagau B | 6568 |
| 1840 | CUGCCUA A UCAUCUC | 6657 | 22968 | HBV-1840 Dz-7 stab3 | gagauga GGCTAGCTACAACGAuaggcag B | 6569 |
| 358 | UCCUCCA A UUUGUCC | 6658 | 22969 | HBV-358 Dz-7 stab3 | ggacaaa GGCTAGCTACAACGAuggagga B | 6570 |
| 1253 | CCUUUGU G UCUCCUC | 6645 | 22970 | HBV-1253 Dz-7 stab3 | gaggaga GGCTAGCTACAACGAacaaagg B | 6571 |
| | | | 20599 | SAC | cₛgₛaₛuₛgu CUAGuGacccgaaagggGaa AagaggB | 6572 |
| 273 | CUUCUCU C AAUUUUC | 5996 | 25516 | HBV-273 UH.Rz-7 mod | gₛaₛaₛaₛauu cUgaugaggccguuaggccgaa agagaag B | 6589 |
| | | | | R18341 all r > | | |
| | | | | Ome active | | |
| 273 | CUUCUCU C AAUUUUC | 5996 | 25535 | HBV-273 UH.Rz-7 mod | gₛaₛaₛaₛauu cUagugacgccguuaggcggaa agagaag B | 6590 |
| | | | | R18341 all r > | | |
| | | | | Ome BAC | | |
| | | | 25536 | HBV-273 UH.Rz-7 mod | aₛaₛuₛgₛagg cUagugacgccguuaggcggaa aaaugaa B | 6591 |
| | | | | R24588 all r > | | |
| | | | | Ome SAC | | |
| | | | 24588 | HBV-273 UH.Rz-7 | aₛaₛuₛgₛagg cUAGuGacgccguuaggcgGaa Aaaugaa B | 6592 |
| | | | | allyl stab1 inact3 | | |
| | | | | scram1 (GUUA SAC) | | |

UPPER CASE = RIBO
UNDERLINE = DEOXY
lower case = 2′-O-methyl
I = inosine
s = phosphorothioate linkage
B = inverted deoxyabasic residue
U = 2′-deoxy-2′-C-allyl Uridine
U = 2′-deoxy-2′-amino Uridine
C = 2′-deoxy-2′-amino Cytidine
L = HEG = hexaethylene glycol spacer

[0255] TABLE XII
Group Designation and Dosage levels for HBV transgenic mouse study

| | | | Number of | Duration of |
|---|---|---|---|---|
| Group | Compound | Dose | Mice | Treatment |
| 1 | RPI.18341 | 100 mg/kg/day* | 10 F | 14 days |
| | (site 273) | | | |
| 2 | RPI.18371 | 100 mg/kg/day* | 10 F | 14 days |
| | (site 1833) | | | |
| 3 | RPI.18418 | 100 mg/kg/day* | 10 F | 14 days |
| | (site 1873) | | | |
| 4 | RPI.18372 | 100 mg/kg/day* | 10 F | 14 days |
| | (site 1874) | | | |
| 5 | Saline control | 100 mg/kg/day* | 10 F | 14 days |
| 6 | Untreated | | 10 F | 0 days |

*administered via sc infusion using Alzet ® mini-osmotic pumps

[0256] TABLE XIII
GROUP DESIGNATION AND DOSAGE LEVELS FOR HBV
TRANSGENIC MOUSE STUDY

| | | | | | Duration |
|---|---|---|---|---|---|
| | | | | Number of | of Treat- |
| Group | Compound | Dose | | Mice | ment |
| 1 | RPI.18341 | 100 | mg/kg/day* | 15 (M or F) | 14 days |
| | (site 273) | | | | |
| 2 | RPI.18341 | 30 | mg/kg/day* | 15 (M or F) | 14 days |
| | (site 273) | | | | |
| 3 | RPI.18341 | 10 | mg/kg/day* | 15 (M or F) | 14 days |
| | (site 273) | | | | |
| 4 | RPI.18371 | 100 | mg/kg/day* | 15 (M or F) | 14 days |
| | site 1833 | | | | |
| 5 | RPI.18371 | 30 | mg/kg/day* | 15 (M or F) | 14 days |
| | site 1833 | | | | |
| 6 | RPI.18371 | 10 | mg/kg/day* | 15 (M or F) | 14 days |
| | site 1833 | | | | |
| 7 | SAC | 100 | mg/kg/day* | 15 (M or F) | 14 days |
| | (RPI.20599) | | | | |
| 8 | SAC | 30 | mg/kg/day* | 15 (M or F) | 14 days |
| | (RPI.20599) | | | | |
| 9 | SAC | 10 | mg/kg/day* | 15 (M or F) | 14 days |
| | (RPI.20599) | | | | |
| 10 | Saline | 12 | μl/day* | 15 (M or F) | 14 days |
| | control | | | | |
| 11 | 3TC ® | 50 | mg/kg/day, PO | 15 (M or F) | 14 days |
| | control | | | | |

*administered via sc infusion using Alzet ® mini-osmotic pumps

The application's sequence listing, which the Patent Office published only in electronic form, follows.

SEQUENCE LISTING (6592 sequences)

SEQ ID NO: 1 - RNA, 20 nt, Hepatitis B virus
cuaucguccccuucuucauc

SEQ ID NO: 2 - RNA, 14 nt, Hepatitis B virus
cuaccguuccggcc

SEQ ID NO: 3 - RNA, 10 nt, Hepatitis B virus
cuucucaucu

SEQ ID NO: 4 - RNA, 14 nt, Hepatitis B virus
cuucccuucaccac

SEQ ID NO: 5 - RNA, 21 nt, Hepatitis B virus
gacucucagaaugucaacgac

SEQ ID NO: 6 - RNA, 20 nt, Hepatitis B virus
cuguaggcauaaauggucug

SEQ ID NO: 7 - RNA, 25 nt, Hepatitis B virus
guucaccagcaccaugcaacuuuuu

SEQ ID NO: 8 - RNA, 21 nt, Hepatitis B virus
uuucacgucugccuaaucauc

SEQ ID NO: 9 - RNA, 12 nt, Hepatitis B virus
auuuggagcuuc

SEQ ID NO: 10 - RNA, 21 nt, Hepatitis B virus
cugacuucuuuccuucuauuc

SEQ ID NO: 11 - RNA, 18 nt, Hepatitis B virus
cucaccauaccgcacuca

SEQ ID NO: 12 - RNA, 16 nt, Hepatitis B virus
ggcaagcuauucugug

SEQ ID NO: 13 - RNA, 18 nt, Hepatitis B virus
ggaaguaauuuggaagac

SEQ ID NO: 14 - RNA, 18 nt, Hepatitis B virus
cagcuaugucaauguuaa

SEQ ID NO: 15 - RNA, 23 nt, Hepatitis B virus
cuaaaaucggccuaaaaucagac

SEQ ID NO: 16 - RNA, 26 nt, Hepatitis B virus
cauuuccugucucacuuuuggaagag

SEQ ID NO: 17 - RNA, 14 nt, Hepatitis B virus
uccugcuuacagac

SEQ ID NO: 18 - RNA, 28 nt, Hepatitis B virus
caacacuuccggaaacuacuguuguuag

SEQ ID NO: 19 - RNA, 23 nt, Hepatitis B virus
cucgccucgcagacgaaggucuc

SEQ ID NO: 20 - RNA, 20 nt, Hepatitis B virus
caaucgccgcgucgcagaag

SEQ ID NO: 21 - RNA, 22 nt, Hepatitis B virus
aucucaaucucgggaaucucaa

SEQ ID NO: 22 - RNA, 21 nt, Hepatitis B virus
auguuaguaucccuuggacuc

SEQ ID NO: 23 - RNA, 22 nt, Hepatitis B virus
cauaaggugggaaacuuuacug

SEQ ID NO: 24 - RNA, 21 nt, Hepatitis B virus
cuguaccuauucuuuaaaucc

SEQ ID NO: 25 - RNA, 17 nt, Hepatitis B virus
cugaguggcaaacuccc

SEQ ID NO: 26 - RNA, 22 nt, Hepatitis B virus
ccaaauaucugcccuuggacaa

SEQ ID NO: 27 - RNA, 23 nt, Hepatitis B virus
auuaaaccauauuauccugaaca

SEQ ID NO: 28 - RNA, 27 nt, Hepatitis B virus
augcaguuaaucauuacuucaaaacua

SEQ ID NO: 29 - RNA, 13 nt, Hepatitis B virus
aaacuaggcauua

SEQ ID NO: 30 - RNA, 24 nt, Hepatitis B virus
aggcgggcauucuauauaagagag

SEQ ID NO: 31 - RNA, 27 nt, Hepatitis B virus
gaaacuacgcgcagcgccucauuuugu

SEQ ID NO: 32 - RNA, 19 nt, Hepatitis B virus
cauuuugugggucaccaua

SEQ ID NO: 33 - RNA, 18 nt, Hepatitis B virus
caagagcuacagcauggg

SEQ ID NO: 34 - RNA, 17 nt, Hepatitis B virus
ccaccacuuuccaccaa

SEQ ID NO: 35 - RNA, 17 nt, Hepatitis B virus
caccacuuuccaccaaa

SEQ ID NO: 36 - RNA, 17 nt, Hepatitis B virus
accacuuuccaccaaac

SEQ ID NO: 37 - RNA, 17 nt, Hepatitis B virus
accaaacucuucaagau

SEQ ID NO: 38 - RNA, 17 nt, Hepatitis B virus
caaacucuucaagaucc

SEQ ID NO: 39 - RNA, 17 nt, Hepatitis B virus
aaacucuucaagauccc

SEQ ID NO: 40 - RNA, 17 nt, Hepatitis B virus
uucaagaucccagaguc

SEQ ID NO: 41 - RNA, 17 nt, Hepatitis B virus
cccagagucagggcccu

SEQ ID NO: 42 - RNA, 17 nt, Hepatitis B virus
ggcccuguacuuuccug

SEQ ID NO: 43 - RNA, 17 nt, Hepatitis B virus
ccuguacuuuccugcug

SEQ ID NO: 44 - RNA, 17 nt, Hepatitis B virus
cuguacuuuccugcugg

SEQ ID NO: 45 - RNA, 17 nt, Hepatitis B virus
uguacuuuccugcuggu

SEQ ID NO: 46 - RNA, 17 nt, Hepatitis B virus
ugguggcuccaguucag

SEQ ID NO: 47 - RNA, 17 nt, Hepatitis B virus
gcuccaguucaggaaca

SEQ ID NO: 48 - RNA, 17 nt, Hepatitis B virus
cuccaguucaggaacag

SEQ ID NO: 49 - RNA, 17 nt, Hepatitis B virus
gcccugcucagaauacu

SEQ ID NO: 50 - RNA, 17 nt, Hepatitis B virus
cucagaauacugucucu

SEQ ID NO: 51 - RNA, 17 nt, Hepatitis B virus
aauacugucucugccau

SEQ ID NO: 52 - RNA, 17 nt, Hepatitis B virus
uacugucucugccauau

SEQ ID NO: 53 - RNA, 17 nt, Hepatitis B virus
ucugccauaucgucaau

SEQ ID NO: 54 - RNA, 17 nt, Hepatitis B virus
ugccauaucgucaaucu

SEQ ID NO: 55 - RNA, 17 nt, Hepatitis B virus
cauaucgucaaucuuau

SEQ ID NO: 56 - RNA, 17 nt, Hepatitis B virus
ucgucaaucuuaucgaa

SEQ ID NO: 57 - RNA, 17 nt, Hepatitis B virus
gucaaucuuaucgaaga

SEQ ID NO: 58 - RNA, 17 nt, Hepatitis B virus
ucaaucuuaucgaagac

SEQ ID NO: 59 - RNA, 17 nt, Hepatitis B virus
aaucuuaucgaagacug

SEQ ID NO: 60 - RNA, 17 nt, Hepatitis B virus
gacccuguaccgaacau

SEQ ID NO: 61 - RNA, 17 nt, Hepatitis B virus
gagaacaucgcaucagg

SEQ ID NO: 62 - RNA, 17 nt, Hepatitis B virus
caucgcaucaggacucc

SEQ ID NO: 63 - RNA, 17 nt, Hepatitis B virus
ucaggacuccuaggacc

SEQ ID NO: 64 - RNA, 17 nt, Hepatitis B virus
ggacuccuaggaccccu

SEQ ID NO: 65 - RNA, 17 nt, Hepatitis B virus
ccccugcucguguuaca

SEQ ID NO: 66 - RNA, 17 nt, Hepatitis B virus
gcucguguuacaggcgg

SEQ ID NO: 67 - RNA, 17 nt, Hepatitis B virus
cucguguuacaggcggg

SEQ ID NO: 68 - RNA, 17 nt, Hepatitis B virus
ggcgggguuuuucuugu

SEQ ID NO: 69 - RNA, 17 nt, Hepatitis B virus
gcgggguuuuucuuguu

SEQ ID NO: 70 - RNA, 17 nt, Hepatitis B virus
cgggguuuuucuuguug

SEQ ID NO: 71 - RNA, 17 nt, Hepatitis B virus
gggguuuuucuuguuga

SEQ ID NO: 72 - RNA, 17 nt, Hepatitis B virus
ggguuuuucuuguugac

SEQ ID NO: 73 - RNA, 17 nt, Hepatitis B virus
guuuuucuuguugacaa

SEQ ID NO: 74 - RNA, 17 nt, Hepatitis B virus
uuucuuguugacaaaaa

SEQ ID NO: 75 - RNA, 17 nt, Hepatitis B virus
acaaaaauccucacaau

SEQ ID NO: 76 - RNA, 17 nt, Hepatitis B virus
aaaauccucacaauacc

SEQ ID NO: 77 - RNA, 17 nt, Hepatitis B virus
cucacaauaccacagag

SEQ ID NO: 78 - RNA, 17 nt, Hepatitis B virus
cacagagucuagacucg

SEQ ID NO: 79 - RNA, 17 nt, Hepatitis B virus
cagagucuagacucgug

SEQ ID NO: 80 - RNA, 17 nt, Hepatitis B virus
ucuagacucguggugga

SEQ ID NO: 81 - RNA, 17 nt, Hepatitis B virus
gguggacuucucucaau

SEQ ID NO: 82 - RNA, 17 nt, Hepatitis B virus
guggacuucucucaauu

SEQ ID NO: 83 - RNA, 17 nt, Hepatitis B virus
ggacuucucucaauuuu

SEQ ID NO: 84 - RNA, 17 nt, Hepatitis B virus
acuucucucaauuuucu

SEQ ID NO: 85 - RNA, 17 nt, Hepatitis B virus
cucucaauuuucuaggg

SEQ ID NO: 86 - RNA, 17 nt, Hepatitis B virus
ucucaauuuucuagggg

SEQ ID NO: 87 - RNA, 17 nt, Hepatitis B virus
cucaauuuucuaggggg

SEQ ID NO: 88 - RNA, 17 nt, Hepatitis B virus
ucaauuuucuaggggga

SEQ ID NO: 89 - RNA, 17 nt, Hepatitis B virus
aauuuucuagggggaac

SEQ ID NO: 90 - RNA, 17 nt, Hepatitis B virus
ccgugugucuuggccaa

SEQ ID NO: 91 - RNA, 17 nt, Hepatitis B virus
gugugucuuggccaaaa

SEQ ID NO: 92 - RNA, 17 nt, Hepatitis B virus
gccaaaauucgcagucc

SEQ ID NO: 93 - RNA, 17 nt, Hepatitis B virus
ccaaaauucgcaguccc

SEQ ID NO: 94 - RNA, 17 nt, Hepatitis B virus
uucgcagucccaaaucu

SEQ ID NO: 95 - RNA, 17 nt, Hepatitis B virus
ucccaaaucuccaguca

SEQ ID NO: 96 - RNA, 17 nt, Hepatitis B virus
ccaaaucuccagucacu

SEQ ID NO: 97 - RNA, 17 nt, Hepatitis B virus
ucuccagucacucacca

SEQ ID NO: 98 - RNA, 17 nt, Hepatitis B virus
cagucacucaccaaccu

SEQ ID NO: 99 - RNA, 17 nt, Hepatitis B virus
caaccuguuguccucca

SEQ ID NO: 100 - RNA, 17 nt, Hepatitis B virus
ccuguuguccuccaauu

SEQ ID NO: 101 - RNA, 17 nt, Hepatitis B virus
guuguccuccaauuugu

SEQ ID NO: 102 - RNA, 17 nt, Hepatitis B virus
ccuccaauuuguccugg

SEQ ID NO: 103 - RNA, 17 nt, Hepatitis B virus
cuccaauuuguccuggu

SEQ ID NO: 104 - RNA, 17 nt, Hepatitis B virus
caauuuguccugguuau

SEQ ID NO: 105 - RNA, 17 nt, Hepatitis B virus
guccugguuaucgcugg

SEQ ID NO: 106 - RNA, 17 nt, Hepatitis B virus
uccugguuaucgcugga

SEQ ID NO: 107 - RNA, 17 nt, Hepatitis B virus
cugguuaucgcuggaug

SEQ ID NO: 108 - RNA, 17 nt, Hepatitis B virus
ggaugugucugcggcgu

SEQ ID NO: 109 - RNA, 17 nt, Hepatitis B virus
ugcggcguuuuaucauc

SEQ ID NO: 110 - RNA, 17 nt, Hepatitis B virus
gcggcguuuuaucaucu

SEQ ID NO: 111 - RNA, 17 nt, Hepatitis B virus
cggcguuuuaucaucuu

SEQ ID NO: 112 - RNA, 17 nt, Hepatitis B virus
ggcguuuuaucaucuuc

SEQ ID NO: 113 - RNA, 17 nt, Hepatitis B virus
cguuuuaucaucuuccu

SEQ ID NO: 114 - RNA, 17 nt, Hepatitis B virus
uuuaucaucuuccucug

SEQ ID NO: 115 - RNA, 17 nt, Hepatitis B virus
uaucaucuuccucugca

SEQ ID NO: 116 - RNA, 17 nt, Hepatitis B virus
aucaucuuccucugcau

SEQ ID NO: 117 - RNA, 17 nt, Hepatitis B virus
aucuuccucugcauccu

SEQ ID NO: 118 - RNA, 17 nt, Hepatitis B virus
cucugcauccugcugcu

SEQ ID NO: 119 - RNA, 17 nt, Hepatitis B virus
cugcugcuaugccucau

SEQ ID NO: 120 - RNA, 17 nt, Hepatitis B virus
cuaugccucaucuucuu

SEQ ID NO: 121 - RNA, 17 nt, Hepatitis B virus
ugccucaucuucuuguu

SEQ ID NO: 122 - RNA, 17 nt, Hepatitis B virus
ccucaucuucuuguugg

SEQ ID NO: 123 - RNA, 17 nt, Hepatitis B virus
cucaucuucuuguuggu

SEQ ID NO: 124 - RNA, 17 nt, Hepatitis B virus
caucuucuuguugguuc

SEQ ID NO: 125 - RNA, 17 nt, Hepatitis B virus
cuucuuguugguucuuc

SEQ ID NO: 126 - RNA, 17 nt, Hepatitis B virus
uuguugguucuucugga

SEQ ID NO: 127 - RNA, 17 nt, Hepatitis B virus
uguugguucuucuggac

SEQ ID NO: 128 - RNA, 17 nt, Hepatitis B virus
uugguucuucuggacua

SEQ ID NO: 129 - RNA, 17 nt, Hepatitis B virus
ugguucuucuggacuau

SEQ ID NO: 130 - RNA, 17 nt, Hepatitis B virus
ucuggacuaucaaggua

SEQ ID NO: 131 - RNA, 17 nt, Hepatitis B virus
uggacuaucaagguaug

SEQ ID NO: 132 - RNA, 17 nt, Hepatitis B virus
aucaagguauguugccc

SEQ ID NO: 133 - RNA, 17 nt, Hepatitis B virus
agguauguugcccguuu

SEQ ID NO: 134 - RNA, 17 nt, Hepatitis B virus
uugcccguuuguccucu

SEQ ID NO: 135 - RNA, 17 nt, Hepatitis B virus
ugcccguuuguccucua

SEQ ID NO: 136 - RNA, 17 nt, Hepatitis B virus
ccguuuguccucuaauu

SEQ ID NO: 137 - RNA, 17 nt, Hepatitis B virus
uuuguccucuaauucca

SEQ ID NO: 138 - RNA, 17 nt, Hepatitis B virus
uguccucuaauuccagg

SEQ ID NO: 139 - RNA, 17 nt, Hepatitis B virus
ccucuaauuccaggauc

SEQ ID NO: 140 - RNA, 17 nt, Hepatitis B virus
cucuaauuccaggauca

SEQ ID NO: 141 - RNA, 17 nt, Hepatitis B virus
uccaggaucaucaacaa

SEQ ID NO: 142 - RNA, 17 nt, Hepatitis B virus
aggaucaucaacaacca

SEQ ID NO: 143 - RNA, 17 nt, Hepatitis B virus
gcacaacuccugcucaa

SEQ ID NO: 144 - RNA, 17 nt, Hepatitis B virus
cuccugcucaaggaacc

SEQ ID NO: 145 - RNA, 17 nt, Hepatitis B virus
aggaaccucuauguuuc

SEQ ID NO: 146 - RNA, 17 nt, Hepatitis B virus
gaaccucuauguuuccc

SEQ ID NO: 147 - RNA, 17 nt, Hepatitis B virus
cucuauguuucccucau

SEQ ID NO: 148 - RNA, 17 nt, Hepatitis B virus
ucuauguuucccucaug

SEQ ID NO: 149 - RNA, 17 nt, Hepatitis B virus
cuauguuucccucaugu

SEQ ID NO: 150 - RNA, 17 nt, Hepatitis B virus
guuucccucauguugcu

SEQ ID NO: 151 - RNA, 17 nt, Hepatitis B virus
ccucauguugcuguaca

SEQ ID NO: 152 - RNA, 17 nt, Hepatitis B virus
guugcuguacaaaaccu

SEQ ID NO: 153 - RNA, 17 nt, Hepatitis B virus
caaaaccuacggacgga

SEQ ID NO: 154 - RNA, 17 nt, Hepatitis B virus
gcaccuguauucccauc

SEQ ID NO: 155 - RNA, 17 nt, Hepatitis B virus
accuguauucccauccc

SEQ ID NO: 156 - RNA, 17 nt, Hepatitis B virus
ccuguauucccauccca

SEQ ID NO: 157 - RNA, 17 nt, Hepatitis B virus
auucccaucccaucauc

SEQ ID NO: 158 - RNA, 17 nt, Hepatitis B virus
caucccaucaucuuggg

SEQ ID NO: 159 - RNA, 17 nt, Hepatitis B virus
cccaucaucuugggcuu

SEQ ID NO: 160 - RNA, 17 nt, Hepatitis B virus
caucaucuugggcuuuc

SEQ ID NO: 161 - RNA, 17 nt, Hepatitis B virus
cuugggcuuucgcaaaa

SEQ ID NO: 162 - RNA, 17 nt, Hepatitis B virus
uugggcuuucgcaaaau

SEQ ID NO: 163 - RNA, 17 nt, Hepatitis B virus
ugggcuuucgcaaaaua

SEQ ID NO: 164 - RNA, 17 nt, Hepatitis B virus
cgcaaaauaccuauggg

SEQ ID NO: 165 - RNA, 17 nt, Hepatitis B virus
aaauaccuaugggagug

SEQ ID NO: 166 - RNA, 17 nt, Hepatitis B virus
gugggccucaguccguu

SEQ ID NO: 167 - RNA, 17 nt, Hepatitis B virus
gccucaguccguuucuc

SEQ ID NO: 168 - RNA, 17 nt, Hepatitis B virus
caguccguuucucuugg

SEQ ID NO: 169 - RNA, 17 nt, Hepatitis B virus
aguccguuucucuuggc

SEQ ID NO: 170 - RNA, 17 nt, Hepatitis B virus
guccguuucucuuggcu

SEQ ID NO: 171 - RNA, 17 nt, Hepatitis B virus
ccguuucucuuggcuca

SEQ ID NO: 172 - RNA, 17 nt, Hepatitis B virus
guuucucuuggcucagu

SEQ ID NO: 173 - RNA, 17 nt, Hepatitis B virus
ucuuggcucaguuuacu

SEQ ID NO: 174 - RNA, 17 nt, Hepatitis B virus
ggcucaguuuacuagug

SEQ ID NO: 175 - RNA, 17 nt, Hepatitis B virus
gcucaguuuacuagugc

SEQ ID NO: 176 - RNA, 17 nt, Hepatitis B virus
cucaguuuacuagugcc

SEQ ID NO: 177 - RNA, 17 nt, Hepatitis B virus
aguuuacuagugccauu

SEQ ID NO: 178 - RNA, 17 nt, Hepatitis B virus
agugccauuuguucagu

SEQ ID NO: 179 - RNA, 17 nt, Hepatitis B virus
gugccauuuguucagug

SEQ ID NO: 180 - RNA, 17 nt, Hepatitis B virus
ccauuuguucagugguu

SEQ ID NO: 181 - RNA, 17 nt, Hepatitis B virus
cauuuguucagugguuc

SEQ ID NO: 182 - RNA, 17 nt, Hepatitis B virus
ucagugguucguagggc

SEQ ID NO: 183 - RNA, 17 nt, Hepatitis B virus
cagugguucguagggcu

SEQ ID NO: 184 - RNA, 17 nt, Hepatitis B virus
ugguucguagggcuuuc

SEQ ID NO: 185 - RNA, 17 nt, Hepatitis B virus
guagggcuuucccccac

SEQ ID NO: 186 - RNA, 17 nt, Hepatitis B virus
uagggcuuucccccacu

SEQ ID NO: 187 - RNA, 17 nt, Hepatitis B virus
agggcuuucccccacug

SEQ ID NO: 188 - RNA, 17 nt, Hepatitis B virus
cccacugucuggcuuuc

SEQ ID NO: 189 - RNA, 17 nt, Hepatitis B virus
gucuggcuuucaguuau

SEQ ID NO: 190 - RNA, 17 nt, Hepatitis B virus
ucuggcuuucaguuaua

SEQ ID NO: 191 - RNA, 17 nt, Hepatitis B virus
cuggcuuucaguuauau

SEQ ID NO: 192 - RNA, 17 nt, Hepatitis B virus
cuuucaguuauauggau

SEQ ID NO: 193 - RNA, 17 nt, Hepatitis B virus
uuucaguuauauggaug

SEQ ID NO: 194 - RNA, 17 nt, Hepatitis B virus
ucaguuauauggaugau

SEQ ID NO: 195 - RNA, 17 nt, Hepatitis B virus
gaugugguuuugggggc

SEQ ID NO: 196 - RNA, 17 nt, Hepatitis B virus
augugguuuugggggcc

SEQ ID NO: 197 - RNA, 17 nt, Hepatitis B virus
ugugguuuugggggcca

SEQ ID NO: 198 - RNA, 17 nt, Hepatitis B virus
ggccaagucuguacaac

SEQ ID NO: 199 - RNA, 17 nt, Hepatitis B virus
aagucuguacaacaucu

SEQ ID NO: 200 - RNA, 17 nt, Hepatitis B virus
uacaacaucuugagucc

SEQ ID NO: 201 - RNA, 17 nt, Hepatitis B virus
caacaucuugagucccu

SEQ ID NO: 202 - RNA, 17 nt, Hepatitis B virus
ucuugagucccuuuaug

SEQ ID NO: 203 - RNA, 17 nt, Hepatitis B virus
gagucccuuuaugccgc

SEQ ID NO: 204 - RNA, 17 nt, Hepatitis B virus
agucccuuuaugccgcu

SEQ ID NO: 205 - RNA, 17 nt, Hepatitis B virus
gucccuuuaugccgcug

SEQ ID NO: 206 - RNA, 17 nt, Hepatitis B virus
gccgcuguuaccaauuu

SEQ ID NO: 207 - RNA, 17 nt, Hepatitis B virus
ccgcuguuaccaauuuu

SEQ ID NO: 208 - RNA, 17 nt, Hepatitis B virus
uuaccaauuuucuuuug

SEQ ID NO: 209 - RNA, 17 nt, Hepatitis B virus
uaccaauuuucuuuugu

SEQ ID NO: 210 - RNA, 17 nt, Hepatitis B virus
accaauuuucuuuuguc

SEQ ID NO: 211 - RNA, 17 nt, Hepatitis B virus
ccaauuuucuuuugucu

SEQ ID NO: 212 - RNA, 17 nt, Hepatitis B virus
aauuuucuuuugucuuu

SEQ ID NO: 213 - RNA, 17 nt, Hepatitis B virus
auuuucuuuugucuuug

SEQ ID NO: 214 - RNA, 17 nt, Hepatitis B virus
uuuucuuuugucuuugg

SEQ ID NO: 215 - RNA, 17 nt, Hepatitis B virus
ucuuuugucuuugggua

SEQ ID NO: 216 - RNA, 17 nt, Hepatitis B virus
uuuugucuuuggguaua

SEQ ID NO: 217 - RNA, 17 nt, Hepatitis B virus
uuugucuuuggguauac

SEQ ID NO: 218 - RNA, 17 nt, Hepatitis B virus
cuuuggguauacauuua

SEQ ID NO: 219 - RNA, 17 nt, Hepatitis B virus
uuggguauacauuuaaa

SEQ ID NO: 220 - RNA, 17 nt, Hepatitis B virus
guauacauuuaaacccu

SEQ ID NO: 221 - RNA, 17 nt, Hepatitis B virus
uauacauuuaaacccuc

SEQ ID NO: 222 - RNA, 17 nt, Hepatitis B virus
auacauuuaaacccuca

SEQ ID NO: 223 - RNA, 17 nt, Hepatitis B virus
uaaacccucacaaaaca

SEQ ID NO: 224 - RNA, 17 nt, Hepatitis B virus
auggggauauucccuua

SEQ ID NO: 225 - RNA, 17 nt, Hepatitis B virus
ggggauauucccuuaac

SEQ ID NO: 226 - RNA, 17 nt, Hepatitis B virus
gggauauucccuuaacu

SEQ ID NO: 227 - RNA, 17 nt, Hepatitis B virus
uauucccuuaacuucau

SEQ ID NO: 228 - RNA, 17 nt, Hepatitis B virus
auucccuuaacuucaug

SEQ ID NO: 229 - RNA, 17 nt, Hepatitis B virus
ccuuaacuucaugggau

SEQ ID NO: 230 - RNA, 17 nt, Hepatitis B virus
cuuaacuucaugggaua

SEQ ID NO: 231 - RNA, 17 nt, Hepatitis B virus
caugggauauguaauug

SEQ ID NO: 232 - RNA, 17 nt, Hepatitis B virus
ggauauguaauugggag

SEQ ID NO: 233 - RNA, 17 nt, Hepatitis B virus
uauguaauugggaguug

SEQ ID NO: 234 - RNA, 17 nt, Hepatitis B virus
uugggaguuggggcaca

SEQ ID NO: 235 - RNA, 17 nt, Hepatitis B virus
gggcacauugccacagg

SEQ ID NO: 236 - RNA, 17 nt, Hepatitis B virus
aggaacauauuguacaa

SEQ ID NO: 237 - RNA, 17 nt, Hepatitis B virus
gaacauauuguacaaaa

SEQ ID NO: 238 - RNA, 17 nt, Hepatitis B virus
cauauuguacaaaaaau

SEQ ID NO: 239 - RNA, 17 nt, Hepatitis B virus
caaaaaaucaaaaugug

SEQ ID NO: 240 - RNA, 17 nt, Hepatitis B virus
aaauguguuuuaggaaa

SEQ ID NO: 241 - RNA, 17 nt, Hepatitis B virus
aauguguuuuaggaaac

SEQ ID NO: 242 - RNA, 17 nt, Hepatitis B virus
auguguuuuaggaaacu

SEQ ID NO: 243 - RNA, 17 nt, Hepatitis B virus
uguguuuuaggaaacuu

SEQ ID NO: 244 - RNA, 17 nt, Hepatitis B virus
aggaaacuuccuguaaa

SEQ ID NO: 245 - RNA, 17 nt, Hepatitis B virus
ggaaacuuccuguaaac

SEQ ID NO: 246 - RNA, 17 nt, Hepatitis B virus
cuuccuguaaacaggcc

SEQ ID NO: 247 - RNA, 17 nt, Hepatitis B virus
acaggccuauugauugg

SEQ ID NO: 248 - RNA, 17 nt, Hepatitis B virus
aggccuauugauuggaa

SEQ ID NO: 249 - RNA, 17 nt, Hepatitis B virus
cuauugauuggaaagua

SEQ ID NO: 250 - RNA, 17 nt, Hepatitis B virus
uggaaaguaugucaacg

SEQ ID NO: 251 - RNA, 17 nt, Hepatitis B virus
aaguaugucaacgaauu

SEQ ID NO: 252 - RNA, 17 nt, Hepatitis B virus
caacgaauugugggucu

SEQ ID NO: 253 - RNA, 17 nt, Hepatitis B virus
uugugggucuuuugggg

SEQ ID NO: 254 - RNA, 17 nt, Hepatitis B virus
gugggucuuuugggguu

SEQ ID NO: 255 - RNA, 17 nt, Hepatitis B virus
ugggucuuuugggguuu

SEQ ID NO: 256 - RNA, 17 nt, Hepatitis B virus
gggucuuuugggguuug

SEQ ID NO: 257 - RNA, 17 nt, Hepatitis B virus
uuugggguuugccgccc

SEQ ID NO: 258 - RNA, 17 nt, Hepatitis B virus
uugggguuugccgcccc

SEQ ID NO: 259 - RNA, 17 nt, Hepatitis B virus
ccgccccuuucacgcaa

SEQ ID NO: 260 - RNA, 17 nt, Hepatitis B virus
cgccccuuucacgcaau

SEQ ID NO: 261 - RNA, 17 nt, Hepatitis B virus
gccccuuucacgcaaug

SEQ ID NO: 262 - RNA, 17 nt, Hepatitis B virus
auguggauauucugcuu

SEQ ID NO: 263 - RNA, 17 nt, Hepatitis B virus
guggauauucugcuuua

SEQ ID NO: 264 - RNA, 17 nt, Hepatitis B virus
uggauauucugcuuuaa

SEQ ID NO: 265 - RNA, 17 nt, Hepatitis B virus
auucugcuuuaaugccu

SEQ ID NO: 266 - RNA, 17 nt, Hepatitis B virus
uucugcuuuaaugccuu

SEQ ID NO: 267 - RNA, 17 nt, Hepatitis B virus
ucugcuuuaaugccuuu

SEQ ID NO: 268 - RNA, 17 nt, Hepatitis B virus
uaaugccuuuauaugca

SEQ ID NO: 269 - RNA, 17 nt, Hepatitis B virus
aaugccuuuauaugcau

SEQ ID NO: 270 - RNA, 17 nt, Hepatitis B virus
augccuuuauaugcaug

SEQ ID NO: 271 - RNA, 17 nt, Hepatitis B virus
gccuuuauaugcaugca

SEQ ID NO: 272 - RNA, 17 nt, Hepatitis B virus
gcaugcauacaagcaaa

SEQ ID NO: 273 - RNA, 17 nt, Hepatitis B virus
aacaggcuuuuacuuuc

SEQ ID NO: 274 - RNA, 17 nt, Hepatitis B virus
acaggcuuuuacuuucu

SEQ ID NO: 275 - RNA, 17 nt, Hepatitis B virus
caggcuuuuacuuucuc

SEQ ID NO: 276 - RNA, 17 nt, Hepatitis B virus
aggcuuuuacuuucucg

SEQ ID NO: 277 - RNA, 17 nt, Hepatitis B virus
cuuuuacuuucucgcca

SEQ ID NO: 278 - RNA, 17 nt, Hepatitis B virus
uuuuacuuucucgccaa

SEQ ID NO: 279 - RNA, 17 nt, Hepatitis B virus
uuuacuuucucgccaac

SEQ ID NO: 280 - RNA, 17 nt, Hepatitis B virus
uacuuucucgccaacuu

SEQ ID NO: 281 - RNA, 17 nt, Hepatitis B virus
cgccaacuuacaaggcc

SEQ ID NO: 282 - RNA, 17 nt, Hepatitis B virus
gccaacuuacaaggccu

SEQ ID NO: 283 - RNA, 17 nt, Hepatitis B virus
caaggccuuucuaagua

SEQ ID NO: 284 - RNA, 17 nt, Hepatitis B virus
aaggccuuucuaaguaa

SEQ ID NO: 285 - RNA, 17 nt, Hepatitis B virus
aggccuuucuaaguaaa

SEQ ID NO: 286 - RNA, 17 nt, Hepatitis B virus
gccuuucuaaguaaaca

SEQ ID NO: 287 - RNA, 17 nt, Hepatitis B virus
uucuaaguaaacaguau

SEQ ID NO: 288 - RNA, 17 nt, Hepatitis B virus
uaaacaguaugugaacc

SEQ ID NO: 289 - RNA, 17 nt, Hepatitis B virus
gugaaccuuuaccccgu

SEQ ID NO: 290 - RNA, 17 nt, Hepatitis B virus
ugaaccuuuaccccguu

SEQ ID NO: 291 - RNA, 17 nt, Hepatitis B virus
gaaccuuuaccccguug

SEQ ID NO: 292 - RNA, 17 nt, Hepatitis B virus
uaccccguugcucggca

SEQ ID NO: 293 - RNA, 17 nt, Hepatitis B virus
ccguugcucggcaacgg

SEQ ID NO: 294 - RNA, 17 nt, Hepatitis B virus
ggccuggucuaugccaa

SEQ ID NO: 295 - RNA, 17 nt, Hepatitis B virus
ccuggucuaugccaagu

SEQ ID NO: 296 - RNA, 17 nt, Hepatitis B virus
ccaaguguuugcugacg

SEQ ID NO: 297 - RNA, 17 nt, Hepatitis B virus
caaguguuugcugacgc

SEQ ID NO: 298 - RNA, 17 nt, Hepatitis B virus
ccacugguuggggcuug

SEQ ID NO: 299 - RNA, 17 nt, Hepatitis B virus
uuggggcuuggccauag

SEQ ID NO: 300 - RNA, 17 nt, Hepatitis B virus
uuggccauaggccauca

SEQ ID NO: 301 - RNA, 17 nt, Hepatitis B virus
uaggccaucagcgcaug

SEQ ID NO: 302 - RNA, 17 nt, Hepatitis B virus
uggaaccuuugugucuc

SEQ ID NO: 303 - RNA, 17 nt, Hepatitis B virus
ggaaccuuugugucucc

SEQ ID NO: 304 - RNA, 17 nt, Hepatitis B virus
cuuugugucuccucugc

SEQ ID NO: 305 - RNA, 17 nt, Hepatitis B virus
uugugucuccucugccg

SEQ ID NO: 306 - RNA, 17 nt, Hepatitis B virus
ugucuccucugccgauc

SEQ ID NO: 307 - RNA, 17 nt, Hepatitis B virus
cugccgauccauaccgc

SEQ ID NO: 308 - RNA, 17 nt, Hepatitis B virus
cgauccauaccgcggaa

SEQ ID NO: 309 - RNA, 17 nt, Hepatitis B virus
gcggaacuccuagccgc

SEQ ID NO: 310 - RNA, 17 nt, Hepatitis B virus
gaacuccuagccgcuug

SEQ ID NO: 311 - RNA, 17 nt, Hepatitis B virus
uagccgcuuguuuugcu

SEQ ID NO: 312 - RNA, 17 nt, Hepatitis B virus
ccgcuuguuuugcucgc

SEQ ID NO: 313 - RNA, 17 nt, Hepatitis B virus
cgcuuguuuugcucgca

SEQ ID NO: 314 - RNA, 17 nt, Hepatitis B virus
gcuuguuuugcucgcag

SEQ ID NO: 315 - RNA, 17 nt, Hepatitis B virus
guuuugcucgcagcagg

SEQ ID NO: 316 - RNA, 17 nt, Hepatitis B virus
cagcaggucuggggcaa

SEQ ID NO: 317 - RNA, 17 nt, Hepatitis B virus
gcaaaacucaucgggac

SEQ ID NO: 318 - RNA, 17 nt, Hepatitis B virus
aaacucaucgggacuga

SEQ ID NO: 319 - RNA, 17 nt, Hepatitis B virus
cugacaauucugucgug

SEQ ID NO: 320 - RNA, 17 nt, Hepatitis B virus
ugacaauucugucgugc

SEQ ID NO: 321 - RNA, 17 nt, Hepatitis B virus
aauucugucgugcucuc

SEQ ID NO: 322 - RNA, 17 nt, Hepatitis B virus
gucgugcucucccgcaa

SEQ ID NO: 323 - RNA, 17 nt, Hepatitis B virus
cgugcucucccgcaaau

SEQ ID NO: 324 - RNA, 17 nt, Hepatitis B virus
ccgcaaauauacaucau

SEQ ID NO: 325 - RNA, 17 nt, Hepatitis B virus
gcaaauauacaucauuu

SEQ ID NO: 326 - RNA, 17 nt, Hepatitis B virus
auauacaucauuuccau

SEQ ID NO: 327 - RNA, 17 nt, Hepatitis B virus
uacaucauuuccauggc

SEQ ID NO: 328 - RNA, 17 nt, Hepatitis B virus
acaucauuuccauggcu

SEQ ID NO: 329 - RNA, 17 nt, Hepatitis B virus
caucauuuccauggcug

SEQ ID NO: 330 - RNA, 17 nt, Hepatitis B virus
uggcugcuaggcugugc

SEQ ID NO: 331 - RNA, 17 nt, Hepatitis B virus
aacuggauccuacgcgg

SEQ ID NO: 332 - RNA, 17 nt, Hepatitis B virus
uggauccuacgcgggac

SEQ ID NO: 333 - RNA, 17 nt, Hepatitis B virus
cgggacguccuuuguuu

SEQ ID NO: 334 - RNA, 17 nt, Hepatitis B virus
gacguccuuuguuuacg

SEQ ID NO: 335 - RNA, 17 nt, Hepatitis B virus
acguccuuuguuuacgu

SEQ ID NO: 336 - RNA, 17 nt, Hepatitis B virus
uccuuuguuuacguccc

SEQ ID NO: 337 - RNA, 17 nt, Hepatitis B virus
ccuuuguuuacgucccg

SEQ ID NO: 338 - RNA, 17 nt, Hepatitis B virus
cuuuguuuacgucccgu

SEQ ID NO: 339 - RNA, 17 nt, Hepatitis B virus
guuuacgucccgucggc

SEQ ID NO: 340 - RNA, 17 nt, Hepatitis B virus
cgucccgucggcgcuga

SEQ ID NO: 341 - RNA, 17 nt, Hepatitis B virus
cgcugaaucccgcggac

SEQ ID NO: 342 - RNA, 17 nt, Hepatitis B virus
cgaccccucccggggcc

SEQ ID NO: 343 - RNA, 17 nt, Hepatitis B virus
gggccgcuuggggcucu

SEQ ID NO: 344 - RNA, 17 nt, Hepatitis B virus
uuggggcucuaccgccc

SEQ ID NO: 345 - RNA, 17 nt, Hepatitis B virus
ggggcucuaccgcccgc

SEQ ID NO: 346 - RNA, 17 nt, Hepatitis B virus
cgcccgcuucuccgccu

SEQ ID NO: 347 - RNA, 17 nt, Hepatitis B virus
gcccgcuucuccgccua

SEQ ID NO: 348 - RNA, 17 nt, Hepatitis B virus
ccgcuucuccgccuauu

SEQ ID NO: 349 - RNA, 17 nt, Hepatitis B virus
cuccgccuauuguaccg

SEQ ID NO: 350 - RNA, 17 nt, Hepatitis B virus
ccgccuauuguaccgac

SEQ ID NO: 351 - RNA, 17 nt, Hepatitis B virus
ccuauuguaccgaccgu

SEQ ID NO: 352 - RNA, 17 nt, Hepatitis B virus
ccgaccguccacggggc

SEQ ID NO: 353 - RNA, 17 nt, Hepatitis B virus
gcgcaccucucuuuacg

SEQ ID NO: 354 - RNA, 17 nt, Hepatitis B virus
gcaccucucuuuacgcg

SEQ ID NO: 355 - RNA, 17 nt, Hepatitis B virus
accucucuuuacgcgga

SEQ ID NO: 356 - RNA, 17 nt, Hepatitis B virus
ccucucuuuacgcggac

SEQ ID NO: 357 - RNA, 17 nt, Hepatitis B virus
cucucuuuacgcggacu

SEQ ID NO: 358 - RNA, 17 nt, Hepatitis B virus
cgcggacuccccgucug

SEQ ID NO: 359 - RNA, 17 nt, Hepatitis B virus
cuccccgucugugccuu

SEQ ID NO: 360 - RNA, 17 nt, Hepatitis B virus
cugugccuucucaucug

SEQ ID NO: 361 - RNA, 17 nt, Hepatitis B virus
ugugccuucucaucugc

SEQ ID NO: 362 - RNA, 17 nt, Hepatitis B virus
ugccuucucaucugccg

SEQ ID NO: 363 - RNA, 17 nt, Hepatitis B virus
cuucucaucugccggac

SEQ ID NO: 364 - RNA, 17 nt, Hepatitis B virus
ugugcacuucgcuucac

SEQ ID NO: 365 - RNA, 17 nt, Hepatitis B virus
gugcacuucgcuucacc

SEQ ID NO: 366 - RNA, 17 nt, Hepatitis B virus
acuucgcuucaccucug

SEQ ID NO: 367 - RNA, 17 nt, Hepatitis B virus
cuucgcuucaccucugc

SEQ ID NO: 368 - RNA, 17 nt, Hepatitis B virus
cuucaccucugcacguc

SEQ ID NO: 369 - RNA, 17 nt, Hepatitis B virus
cugcacgucgcauggag

SEQ ID NO: 370 - RNA, 17 nt, Hepatitis B virus
cccaaggucuugcauaa

SEQ ID NO: 371 - RNA, 17 nt, Hepatitis B virus
caaggucuugcauaaga

SEQ ID NO: 372 - RNA, 17 nt, Hepatitis B virus
ucuugcauaagaggacu

SEQ ID NO: 373 - RNA, 17 nt, Hepatitis B virus
agaggacucuuggacuu

SEQ ID NO: 374 - RNA, 17 nt, Hepatitis B virus
aggacucuuggacuuuc

SEQ ID NO: 375 - RNA, 17 nt, Hepatitis B virus
cuuggacuuucagcaau

SEQ ID NO: 376 - RNA, 17 nt, Hepatitis B virus
uuggacuuucagcaaug

SEQ ID NO: 377 - RNA, 17 nt, Hepatitis B virus
uggacuuucagcaaugu

SEQ ID NO: 378 - RNA, 17 nt, Hepatitis B virus
agcaaugucaacgaccg

SEQ ID NO: 379 - RNA, 17 nt, Hepatitis B virus
accgaccuugaggcaua

SEQ ID NO: 380 - RNA, 17 nt, Hepatitis B virus
ugaggcauacuucaaag

SEQ ID NO: 381 - RNA, 17 nt, Hepatitis B virus
ggcauacuucaaagacu

SEQ ID NO: 382 - RNA, 17 nt, Hepatitis B virus
gcauacuucaaagacug

SEQ ID NO: 383 - RNA, 17 nt, Hepatitis B virus
cuguguguuuaaugagu

SEQ ID NO: 384 - RNA, 17 nt, Hepatitis B virus
uguguguuuaaugagug

SEQ ID NO: 385 - RNA, 17 nt, Hepatitis B virus
guguguuuaaugagugg

SEQ ID NO: 386 - RNA, 17 nt, Hepatitis B virus
ggaggaguugggggagg

SEQ ID NO: 387 - RNA, 17 nt, Hepatitis B virus
gaggagguuagguuaaa

SEQ ID NO: 388 - RNA, 17 nt, Hepatitis B virus
aggagguuagguuaaag

SEQ ID NO: 389 - RNA, 17 nt, Hepatitis B virus
gguuagguuaaaggucu

SEQ ID NO: 390 - RNA, 17 nt, Hepatitis B virus
guuagguuaaaggucuu

SEQ ID NO: 391 - RNA, 17 nt, Hepatitis B virus
uuaaaggucuuuguacu

SEQ ID NO: 392 - RNA, 17 nt, Hepatitis B virus
aaaggucuuuguacuag

SEQ ID NO: 393 - RNA, 17 nt, Hepatitis B virus
aaggucuuuguacuagg

SEQ ID NO: 394 - RNA, 17 nt, Hepatitis B virus
gucuuuguacuaggagg

SEQ ID NO: 395 - RNA, 17 nt, Hepatitis B virus
uuuguacuaggaggcug

SEQ ID NO: 396 - RNA, 17 nt, Hepatitis B virus
gaggcuguaggcauaaa

SEQ ID NO: 397 - RNA, 17 nt, Hepatitis B virus
guaggcauaaauuggug

SEQ ID NO: 398 - RNA, 17 nt, Hepatitis B virus
gcauaaauugguguguu

SEQ ID NO: 399 - RNA, 17 nt, Hepatitis B virus
ugguguguucaccagca

SEQ ID NO: 400 - RNA, 17 nt, Hepatitis B virus
gguguguucaccagcac

SEQ ID NO: 401 - RNA, 17 nt, Hepatitis B virus
augcaacuuuuucaccu

SEQ ID NO: 402 - RNA, 17 nt, Hepatitis B virus
ugcaacuuuuucaccuc

SEQ ID NO: 403 - RNA, 17 nt, Hepatitis B virus
gcaacuuuuucaccucu

SEQ ID NO: 404 - RNA, 17 nt, Hepatitis B virus
caacuuuuucaccucug

SEQ ID NO: 405 - RNA, 17 nt, Hepatitis B virus
aacuuuuucaccucugc

SEQ ID NO: 406 - RNA, 17 nt, Hepatitis B virus
uuucaccucugccuaau

SEQ ID NO: 407 - RNA, 17 nt, Hepatitis B virus
cucugccuaaucaucuc

SEQ ID NO: 408 - RNA, 17 nt, Hepatitis B virus
ugccuaaucaucucaug

SEQ ID NO: 409 - RNA, 17 nt, Hepatitis B virus
cuaaucaucucauguuc

SEQ ID NO: 410 - RNA, 17 nt, Hepatitis B virus
aaucaucucauguucau

SEQ ID NO: 411 - RNA, 17 nt, Hepatitis B virus
ucucauguucauguccu

SEQ ID NO: 412 - RNA, 17 nt, Hepatitis B virus
cucauguucauguccua

SEQ ID NO: 413 - RNA, 17 nt, Hepatitis B virus
guucauguccuacuguu

SEQ ID NO: 414 - RNA, 17 nt, Hepatitis B virus
cauguccuacuguucaa

SEQ ID NO: 415 - RNA, 17 nt, Hepatitis B virus
ccuacuguucaagccuc

SEQ ID NO: 416 - RNA, 17 nt, Hepatitis B virus
cuacuguucaagccucc

SEQ ID NO: 417 - RNA, 17 nt, Hepatitis B virus
ucaagccuccaagcugu

SEQ ID NO: 418 - RNA, 17 nt, Hepatitis B virus
cugugccuuggguggcu

SEQ ID NO: 419 - RNA, 17 nt, Hepatitis B virus
ggguggcuuuggggcau

SEQ ID NO: 420 - RNA, 17 nt, Hepatitis B virus
gguggcuuuggggcaug

SEQ ID NO: 421 - RNA, 17 nt, Hepatitis B virus
auggacauugacccgua

SEQ ID NO: 422 - RNA, 17 nt, Hepatitis B virus
ugacccguauaaagaau

SEQ ID NO: 423 - RNA, 17 nt, Hepatitis B virus
acccguauaaagaauuu

SEQ ID NO: 424 - RNA, 17 nt, Hepatitis B virus
uaaagaauuuggagcuu

SEQ ID NO: 425 - RNA, 17 nt, Hepatitis B virus
aaagaauuuggagcuuc

SEQ ID NO: 426 - RNA, 17 nt, Hepatitis B virus
uuggagcuucuguggag

SEQ ID NO: 427 - RNA, 17 nt, Hepatitis B virus
uggagcuucuguggagu

SEQ ID NO: 428 - RNA, 17 nt, Hepatitis B virus
uguggaguuacucucuu

SEQ ID NO: 429 - RNA, 17 nt, Hepatitis B virus
guggaguuacucucuuu

SEQ ID NO: 430 - RNA, 17 nt, Hepatitis B virus
gaguuacucucuuuuuu

SEQ ID NO: 431 - RNA, 17 nt, Hepatitis B virus
guuacucucuuuuuugc

SEQ ID NO: 432 - RNA, 17 nt, Hepatitis B virus
uacucucuuuuuugccu

SEQ ID NO: 433 - RNA, 17 nt, Hepatitis B virus
acucucuuuuuugccuu

SEQ ID NO: 434 - RNA, 17 nt, Hepatitis B virus
cucucuuuuuugccuuc

SEQ ID NO: 435 - RNA, 17 nt, Hepatitis B virus
ucucuuuuuugccuucu

SEQ ID NO: 436 - RNA, 17 nt, Hepatitis B virus
cucuuuuuugccuucug

SEQ ID NO: 437 - RNA, 17 nt, Hepatitis B virus
uuuugccuucugacuuc

SEQ ID NO: 438 - RNA, 17 nt, Hepatitis B virus
uuugccuucugacuucu

SEQ ID NO: 439 - RNA, 17 nt, Hepatitis B virus
uucugacuucuuuccuu

SEQ ID NO: 440 - RNA, 17 nt, Hepatitis B virus
ucugacuucuuuccuuc

SEQ ID NO: 441 - RNA, 17 nt, Hepatitis B virus
ugacuucuuuccuucua

SEQ ID NO: 442 - RNA, 17 nt, Hepatitis B virus
gacuucuuuccuucuau

SEQ ID NO: 443 - RNA, 17 nt, Hepatitis B virus
acuucuuuccuucuauu

SEQ ID NO: 444 - RNA, 17 nt, Hepatitis B virus
ucuuuccuucuauucga

SEQ ID NO: 445 - RNA, 17 nt, Hepatitis B virus
cuuuccuucuauucgag

SEQ ID NO: 446 - RNA, 17 nt, Hepatitis B virus
uuccuucuauucgagau

SEQ ID NO: 447 - RNA, 17 nt, Hepatitis B virus
ccuucuauucgagaucu

SEQ ID NO: 448 - RNA, 17 nt, Hepatitis B virus
cuucuauucgagaucuc

SEQ ID NO: 449 - RNA, 17 nt, Hepatitis B virus
uucgagaucuccucgac

SEQ ID NO: 450 - RNA, 17 nt, Hepatitis B virus
cgagaucuccucgacac

SEQ ID NO: 451 - RNA, 17 nt, Hepatitis B virus
gaucuccucgacaccgc

SEQ ID NO: 452 - RNA, 17 nt, Hepatitis B virus
caccgccucugcucugu

SEQ ID NO: 453 - RNA, 17 nt, Hepatitis B virus
ccucugcucuguaucgg

SEQ ID NO: 454 - RNA, 17 nt, Hepatitis B virus
ugcucuguaucgggggg

SEQ ID NO: 455 - RNA, 17 nt, Hepatitis B virus
cucuguaucggggggcc

SEQ ID NO: 456 - RNA, 17 nt, Hepatitis B virus
gggggccuuagagucuc

SEQ ID NO: 457 - RNA, 17 nt, Hepatitis B virus
ggggccuuagagucucc

SEQ ID NO: 458 - RNA, 17 nt, Hepatitis B virus
cuuagagucuccggaac

SEQ ID NO: 459 - RNA, 17 nt, Hepatitis B virus
uagagucuccggaacau

SEQ ID NO: 460 - RNA, 17 nt, Hepatitis B virus
cggaacauuguucaccu

SEQ ID NO: 461 - RNA, 17 nt, Hepatitis B virus
aacauuguucaccucac

SEQ ID NO: 462 - RNA, 17 nt, Hepatitis B virus
acauuguucaccucacc

SEQ ID NO: 463 - RNA, 17 nt, Hepatitis B virus
guucaccucaccauacg

SEQ ID NO: 464 - RNA, 17 nt, Hepatitis B virus
cucaccauacggcacuc

SEQ ID NO: 465 - RNA, 17 nt, Hepatitis B virus
acggcacucaggcaagc

SEQ ID NO: 466 - RNA, 17 nt, Hepatitis B virus
ggcaagcuauucugugu

SEQ ID NO: 467 - RNA, 17 nt, Hepatitis B virus
caagcuauucuguguug

SEQ ID NO: 468 - RNA, 17 nt, Hepatitis B virus
aagcuauucuguguugg

SEQ ID NO: 469 - RNA, 17 nt, Hepatitis B virus
uucuguguuggggugag

SEQ ID NO: 470 - RNA, 17 nt, Hepatitis B virus
gggugaguugaugaauc

SEQ ID NO: 471 - RNA, 17 nt, Hepatitis B virus
ugaugaaucuagccacc

SEQ ID NO: 472 - RNA, 17 nt, Hepatitis B virus
augaaucuagccaccug

SEQ ID NO: 473 - RNA, 17 nt, Hepatitis B virus
ugggaaguaauuuggaa

SEQ ID NO: 474 - RNA, 17 nt, Hepatitis B virus
gaaguaauuuggaagau

SEQ ID NO: 475 - RNA, 17 nt, Hepatitis B virus
aaguaauuuggaagauc

SEQ ID NO: 476 - RNA, 17 nt, Hepatitis B virus
uggaagauccagcaucc

SEQ ID NO: 477 - RNA, 17 nt, Hepatitis B virus
uccagcauccagggaau

SEQ ID NO: 478 - RNA, 17 nt, Hepatitis B virus
cagggaauuaguaguca

SEQ ID NO: 479 - RNA, 17 nt, Hepatitis B virus
agggaauuaguagucag

SEQ ID NO: 480 - RNA, 17 nt, Hepatitis B virus
gaauuaguagucagcua

SEQ ID NO: 481 - RNA, 17 nt, Hepatitis B virus
uuaguagucagcuaugu

SEQ ID NO: 482 - RNA, 17 nt, Hepatitis B virus
agucagcuaugucaacg

SEQ ID NO: 483 - RNA, 17 nt, Hepatitis B virus
agcuaugucaacguuaa

SEQ ID NO: 484 - RNA, 17 nt, Hepatitis B virus
gucaacguuaauauggg

SEQ ID NO: 485 - RNA, 17 nt, Hepatitis B virus
ucaacguuaauaugggc

SEQ ID NO: 486 - RNA, 17 nt, Hepatitis B virus
acguuaauaugggccua

SEQ ID NO: 487 - RNA, 17 nt, Hepatitis B virus
augggccuaaaaaucag

SEQ ID NO: 488 - RNA, 17 nt, Hepatitis B virus
cuaaaaaucagacaacu

SEQ ID NO: 489 - RNA, 17 nt, Hepatitis B virus
agacaacuauugugguu

SEQ ID NO: 490 - RNA, 17 nt, Hepatitis B virus
acaacuauugugguuuc

SEQ ID NO: 491 - RNA, 17 nt, Hepatitis B virus
auugugguuucacauuu

SEQ ID NO: 492 - RNA, 17 nt, Hepatitis B virus
uugugguuucacauuuc

SEQ ID NO: 493 - RNA, 17 nt, Hepatitis B virus
ugugguuucacauuucc

SEQ ID NO: 494 - RNA, 17 nt, Hepatitis B virus
uuucacauuuccugucu

SEQ ID NO: 495 - RNA, 17 nt, Hepatitis B virus
uucacauuuccugucuu

SEQ ID NO: 496 - RNA, 17 nt, Hepatitis B virus
ucacauuuccugucuua

SEQ ID NO: 497 - RNA, 17 nt, Hepatitis B virus
uuuccugucuuacuuuu

SEQ ID NO: 498 - RNA, 17 nt, Hepatitis B virus
uccugucuuacuuuugg

SEQ ID NO: 499 - RNA, 17 nt, Hepatitis B virus
ccugucuuacuuuuggg

SEQ ID NO: 500 - RNA, 17 nt, Hepatitis B virus
gucuuacuuuugggcga

SEQ ID NO: 501 - RNA, 17 nt, Hepatitis B virus
ucuuacuuuugggcgag

SEQ ID NO: 502 - RNA, 17 nt, Hepatitis B virus
cuuacuuuugggcgaga

SEQ ID NO: 503 - RNA, 17 nt, Hepatitis B virus
gaaacuguucuugaaua

SEQ ID NO: 504 - RNA, 17 nt, Hepatitis B virus
aaacuguucuugaauau

SEQ ID NO: 505 - RNA, 17 nt, Hepatitis B virus
acuguucuugaauauuu

SEQ ID NO: 506 - RNA, 17 nt, Hepatitis B virus
ucuugaauauuuggugu

SEQ ID NO: 507 - RNA, 17 nt, Hepatitis B virus
uugaauauuuggugucu

SEQ ID NO: 508 - RNA, 17 nt, Hepatitis B virus
ugaauauuuggugucuu

SEQ ID NO: 509 - RNA, 17 nt, Hepatitis B virus
uuuggugucuuuuggag

SEQ ID NO: 510 - RNA, 17 nt, Hepatitis B virus
uggugucuuuuggagug

SEQ ID NO: 511 - RNA, 17 nt, Hepatitis B virus
ggugucuuuuggagugu

SEQ ID NO: 512 - RNA, 17 nt, Hepatitis B virus
gugucuuuuggagugug

SEQ ID NO: 513 - RNA, 17 nt, Hepatitis B virus
guguggauucgcacucc

SEQ ID NO: 514 - RNA, 17 nt, Hepatitis B virus
uguggauucgcacuccu

SEQ ID NO: 515 - RNA, 17 nt, Hepatitis B virus
uucgcacuccuccugca

SEQ ID NO: 516 - RNA, 17 nt, Hepatitis B virus
gcacuccuccugcauau

SEQ ID NO: 517 - RNA, 17 nt, Hepatitis B virus
uccugcauauagaccac

SEQ ID NO: 518 - RNA, 17 nt, Hepatitis B virus
cugcauauagaccacca

SEQ ID NO: 519 - RNA, 17 nt, Hepatitis B virus
augccccuaucuuauca

SEQ ID NO: 520 - RNA, 17 nt, Hepatitis B virus
gccccuaucuuaucaac

SEQ ID NO: 521 - RNA, 17 nt, Hepatitis B virus
cccuaucuuaucaacac

SEQ ID NO: 522 - RNA, 17 nt, Hepatitis B virus
ccuaucuuaucaacacu

SEQ ID NO: 523 - RNA, 17 nt, Hepatitis B virus
uaucuuaucaacacuuc

SEQ ID NO: 524 - RNA, 17 nt, Hepatitis B virus
ucaacacuuccggaaac

SEQ ID NO: 525 - RNA, 17 nt, Hepatitis B virus
caacacuuccggaaacu

SEQ ID NO: 526 - RNA, 17 nt, Hepatitis B virus
cggaaacuacuguuguu

SEQ ID NO: 527 - RNA, 17 nt, Hepatitis B virus
acuacuguuguuagacg

SEQ ID NO: 528 - RNA, 17 nt, Hepatitis B virus
acuguuguuagacgaag

SEQ ID NO: 529 - RNA, 17 nt, Hepatitis B virus
cuguuguuagacgaaga

SEQ ID NO: 530 - RNA, 17 nt, Hepatitis B virus
aggcagguccccuagaa

SEQ ID NO: 531 - RNA, 17 nt, Hepatitis B virus
gguccccuagaagaaga

SEQ ID NO: 532 - RNA, 17 nt, Hepatitis B virus
gaagaacucccucgccu

SEQ ID NO: 533 - RNA, 17 nt, Hepatitis B virus
aacucccucgccucgca

SEQ ID NO: 534 - RNA, 17 nt, Hepatitis B virus
ccucgccucgcagacga

SEQ ID NO: 535 - RNA, 17 nt, Hepatitis B virus
acgaaggucucaaucgc

SEQ ID NO: 536 - RNA, 17 nt, Hepatitis B virus
gaaggucucaaucgccg

SEQ ID NO: 537 - RNA, 17 nt, Hepatitis B virus
gucucaaucgccgcguc

SEQ ID NO: 538 - RNA, 17 nt, Hepatitis B virus
cgccgcgucgcagaaga

SEQ ID NO: 539 - RNA, 17 nt, Hepatitis B virus
cagaagaucucaaucuc

SEQ ID NO: 540 - RNA, 17 nt, Hepatitis B virus
gaagaucucaaucucgg

SEQ ID NO: 541 - RNA, 17 nt, Hepatitis B virus
aucucaaucucgggaau

SEQ ID NO: 542 - RNA, 17 nt, Hepatitis B virus
cucaaucucgggaaucu

SEQ ID NO: 543 - RNA, 17 nt, Hepatitis B virus
ucgggaaucucaauguu

SEQ ID NO: 544 - RNA, 17 nt, Hepatitis B virus
gggaaucucaauguuag

SEQ ID NO: 545 - RNA, 17 nt, Hepatitis B virus
cucaauguuaguauucc

SEQ ID NO: 546 - RNA, 17 nt, Hepatitis B virus
ucaauguuaguauuccu

SEQ ID NO: 547 - RNA, 17 nt, Hepatitis B virus
auguuaguauuccuugg

SEQ ID NO: 548 - RNA, 17 nt, Hepatitis B virus
guuaguauuccuuggac

SEQ ID NO: 549 - RNA, 17 nt, Hepatitis B virus
uuaguauuccuuggaca

SEQ ID NO: 550 - RNA, 17 nt, Hepatitis B virus
guauuccuuggacacau

SEQ ID NO: 551 - RNA, 17 nt, Hepatitis B virus
ggacacauaagguggga

SEQ ID NO: 552 - RNA, 17 nt, Hepatitis B virus
gggaaacuuuacggggc

SEQ ID NO: 553 - RNA, 17 nt, Hepatitis B virus
ggaaacuuuacggggcu

SEQ ID NO: 554 - RNA, 17 nt, Hepatitis B virus
gaaacuuuacggggcuu

SEQ ID NO: 555 - RNA, 17 nt, Hepatitis B virus
acggggcuuuauucuuc

SEQ ID NO: 556 - RNA, 17 nt, Hepatitis B virus
cggggcuuuauucuucu

SEQ ID NO: 557 - RNA, 17 nt, Hepatitis B virus
ggggcuuuauucuucua

SEQ ID NO: 558 - RNA, 17 nt, Hepatitis B virus
ggcuuuauucuucuacg

SEQ ID NO: 559 - RNA, 17 nt, Hepatitis B virus
gcuuuauucuucuacgg

SEQ ID NO: 560 - RNA, 17 nt, Hepatitis B virus
uuuauucuucuacggua

SEQ ID NO: 561 - RNA, 17 nt, Hepatitis B virus
uuauucuucuacgguac

SEQ ID NO: 562 - RNA, 17 nt, Hepatitis B virus
auucuucuacgguaccu

SEQ ID NO: 563 - RNA, 17 nt, Hepatitis B virus
ucuacgguaccuugcuu

SEQ ID NO: 564 - RNA, 17 nt, Hepatitis B virus
cgguaccuugcuuuaau

SEQ ID NO: 565 - RNA, 17 nt, Hepatitis B virus
accuugcuuuaauccua

SEQ ID NO: 566 - RNA, 17 nt, Hepatitis B virus
ccuugcuuuaauccuaa

SEQ ID NO: 567 - RNA, 17 nt, Hepatitis B virus
cuugcuuuaauccuaaa

SEQ ID NO: 568 - RNA, 17 nt, Hepatitis B virus
gcuuuaauccuaaaugg

SEQ ID NO: 569 - RNA, 17 nt, Hepatitis B virus
uuaauccuaaauggcaa

SEQ ID NO: 570 - RNA, 17 nt, Hepatitis B virus
ggcaaacuccuucuuuu

SEQ ID NO: 571 - RNA, 17 nt, Hepatitis B virus
aaacuccuucuuuuccu

SEQ ID NO: 572 - RNA, 17 nt, Hepatitis B virus
aacuccuucuuuuccug

SEQ ID NO: 573 - RNA, 17 nt, Hepatitis B virus
cuccuucuuuuccugac

SEQ ID NO: 574 - RNA, 17 nt, Hepatitis B virus
uccuucuuuuccugaca

SEQ ID NO: 575 - RNA, 17 nt, Hepatitis B virus
ccuucuuuuccugacau

SEQ ID NO: 576 - RNA, 17 nt, Hepatitis B virus
cuucuuuuccugacauu

SEQ ID NO: 577 - RNA, 17 nt, Hepatitis B virus
ccugacauucauuugca

SEQ ID NO: 578 - RNA, 17 nt, Hepatitis B virus
cugacauucauuugcag

SEQ ID NO: 579 - RNA, 17 nt, Hepatitis B virus
acauucauuugcaggag

SEQ ID NO: 580 - RNA, 17 nt, Hepatitis B virus
cauucauuugcaggagg

SEQ ID NO: 581 - RNA, 17 nt, Hepatitis B virus
gaggacauuguugauag

SEQ ID NO: 582 - RNA, 17 nt, Hepatitis B virus
gacauuguugauagaug

SEQ ID NO: 583 - RNA, 17 nt, Hepatitis B virus
uuguugauagauguaag

SEQ ID NO: 584 - RNA, 17 nt, Hepatitis B virus
auagauguaagcaauuu

SEQ ID NO: 585 - RNA, 17 nt, Hepatitis B virus
uaagcaauuuguggggc

SEQ ID NO: 586 - RNA, 17 nt, Hepatitis B virus
aagcaauuuguggggcc

SEQ ID NO: 587 - RNA, 17 nt, Hepatitis B virus
gggccccuuacaguaaa

SEQ ID NO: 588 - RNA, 17 nt, Hepatitis B virus
ggccccuuacaguaaau

SEQ ID NO: 589 - RNA, 17 nt, Hepatitis B virus
cuuacaguaaaugaaaa

SEQ ID NO: 590 - RNA, 17 nt, Hepatitis B virus
aggagacuuaaauuaac

SEQ ID NO: 591 - RNA, 17 nt, Hepatitis B virus
ggagacuuaaauuaacu

SEQ ID NO: 592 - RNA, 17 nt, Hepatitis B virus
acuuaaauuaacuaugc

SEQ ID NO: 593 - RNA, 17 nt, Hepatitis B virus
cuuaaauuaacuaugcc

SEQ ID NO: 594 - RNA, 17 nt, Hepatitis B virus
aauuaacuaugccugcu

SEQ ID NO: 595 - RNA, 17 nt, Hepatitis B virus
ugccugcuagguuuuau

SEQ ID NO: 596 - RNA, 17 nt, Hepatitis B virus
ugcuagguuuuauccca

SEQ ID NO: 597 - RNA, 17 nt, Hepatitis B virus
gcuagguuuuaucccaa

SEQ ID NO: 598 - RNA, 17 nt, Hepatitis B virus
cuagguuuuaucccaau

SEQ ID NO: 599 - RNA, 17 nt, Hepatitis B virus
uagguuuuaucccaaug

SEQ ID NO: 600 - RNA, 17 nt, Hepatitis B virus
gguuuuaucccaauguu

SEQ ID NO: 601 - RNA, 17 nt, Hepatitis B virus
cccaauguuacuaaaua

SEQ ID NO: 602 - RNA, 17 nt, Hepatitis B virus
ccaauguuacuaaauau

SEQ ID NO: 603 - RNA, 17 nt, Hepatitis B virus
auguuacuaaauauuug

SEQ ID NO: 604 - RNA, 17 nt, Hepatitis B virus
uacuaaauauuugcccu

SEQ ID NO: 605 - RNA, 17 nt, Hepatitis B virus
cuaaauauuugcccuua

SEQ ID NO: 606 - RNA, 17 nt, Hepatitis B virus
uaaauauuugcccuuag

SEQ ID NO: 607 - RNA, 17 nt, Hepatitis B virus
uuugcccuuagauaaag

SEQ ID NO: 608 - RNA, 17 nt, Hepatitis B virus
uugcccuuagauaaagg

SEQ ID NO: 609 - RNA, 17 nt, Hepatitis B virus
ccuuagauaaagggauc

SEQ ID NO: 610 - RNA, 17 nt, Hepatitis B virus
aaagggaucaaaccgua

SEQ ID NO: 611 - RNA, 17 nt, Hepatitis B virus
caaaccguauuauccag

SEQ ID NO: 612 - RNA, 17 nt, Hepatitis B virus
aaccguauuauccagag

SEQ ID NO: 613 - RNA, 17 nt, Hepatitis B virus
accguauuauccagagu

SEQ ID NO: 614 - RNA, 17 nt, Hepatitis B virus
cguauuauccagaguau

SEQ ID NO: 615 - RNA, 17 nt, Hepatitis B virus
uccagaguauguaguua

SEQ ID NO: 616 - RNA, 17 nt, Hepatitis B virus
gaguauguaguuaauca

SEQ ID NO: 617 - RNA, 17 nt, Hepatitis B virus
uauguaguuaaucauua

SEQ ID NO: 618 - RNA, 17 nt, Hepatitis B virus
auguaguuaaucauuac

SEQ ID NO: 619 - RNA, 17 nt, Hepatitis B virus
uaguuaaucauuacuuc

SEQ ID NO: 620 - RNA, 17 nt, Hepatitis B virus
uuaaucauuacuuccag

SEQ ID NO: 621 - RNA, 17 nt, Hepatitis B virus
uaaucauuacuuccaga

SEQ ID NO: 622 - RNA, 17 nt, Hepatitis B virus
ucauuacuuccagacgc

SEQ ID NO: 623 - RNA, 17 nt, Hepatitis B virus
cauuacuuccagacgcg

SEQ ID NO: 624 - RNA, 17 nt, Hepatitis B virus
cgcgacauuauuuacac

SEQ ID NO: 625 - RNA, 17 nt, Hepatitis B virus
gcgacauuauuuacaca

SEQ ID NO: 626 - RNA, 17 nt, Hepatitis B virus
gacauuauuuacacacu

SEQ ID NO: 627 - RNA, 17 nt, Hepatitis B virus
acauuauuuacacacuc

SEQ ID NO: 628 - RNA, 17 nt, Hepatitis B virus
cauuauuuacacacucu

SEQ ID NO: 629 - RNA, 17 nt, Hepatitis B virus
uacacacucuuuggaag

SEQ ID NO: 630 - RNA, 17 nt, Hepatitis B virus
cacacucuuuggaaggc

SEQ ID NO: 631 - RNA, 17 nt, Hepatitis B virus
acacucuuuggaaggcg

SEQ ID NO: 632 - RNA, 17 nt, Hepatitis B virus
gcggggaucuuauauaa

SEQ ID NO: 633 - RNA, 17 nt, Hepatitis B virus
ggggaucuuauauaaaa

SEQ ID NO: 634 - RNA, 17 nt, Hepatitis B virus
gggaucuuauauaaaag

SEQ ID NO: 635 - RNA, 17 nt, Hepatitis B virus
gaucuuauauaaaagag

SEQ ID NO: 636 - RNA, 17 nt, Hepatitis B virus
ucuuauauaaaagagag

SEQ ID NO: 637 - RNA, 17 nt, Hepatitis B virus
aagagaguccacacgua

SEQ ID NO: 638 - RNA, 17 nt, Hepatitis B virus
ccacacguagcgccuca

SEQ ID NO: 639 - RNA, 17 nt, Hepatitis B virus
uagcgccucauuuugcg

SEQ ID NO: 640 - RNA, 17 nt, Hepatitis B virus
cgccucauuuugcgggu

SEQ ID NO: 641 - RNA, 17 nt, Hepatitis B virus
gccucauuuugcggguc

SEQ ID NO: 642 - RNA, 17 nt, Hepatitis B virus
ccucauuuugcggguca

SEQ ID NO: 643 - RNA, 17 nt, Hepatitis B virus
uugcgggucaccauauu

SEQ ID NO: 644 - RNA, 17 nt, Hepatitis B virus
gucaccauauucuuggg

SEQ ID NO: 645 - RNA, 17 nt, Hepatitis B virus
caccauauucuugggaa

SEQ ID NO: 646 - RNA, 17 nt, Hepatitis B virus
accauauucuugggaac

SEQ ID NO: 647 - RNA, 17 nt, Hepatitis B virus
cauauucuugggaacaa

SEQ ID NO: 648 - RNA, 17 nt, Hepatitis B virus
aacaagaucuacagcau

SEQ ID NO: 649 - RNA, 17 nt, Hepatitis B virus
caagaucuacagcaugg

SEQ ID NO: 650 - RNA, 17 nt, Hepatitis B virus
ugggagguuggucuucc

SEQ ID NO: 651 - RNA, 17 nt, Hepatitis B virus
agguuggucuuccaaac

SEQ ID NO: 652 - RNA, 17 nt, Hepatitis B virus
guuggucuuccaaaccu

SEQ ID NO: 653 - RNA, 17 nt, Hepatitis B virus
uuggucuuccaaaccuc

SEQ ID NO: 654 - RNA, 17 nt, Hepatitis B virus
ccaaaccucgaaaaggc

SEQ ID NO: 655 - RNA, 17 nt, Hepatitis B virus
ggacaaaucuuucuguc

SEQ ID NO: 656 - RNA, 17 nt, Hepatitis B virus
acaaaucuuucuguccc

SEQ ID NO: 657 - RNA, 17 nt, Hepatitis B virus
caaaucuuucugucccc

SEQ ID NO: 658 - RNA, 17 nt, Hepatitis B virus
aaaucuuucugucccca

SEQ ID NO: 659 - RNA, 17 nt, Hepatitis B virus
cuuucuguccccaaucc

SEQ ID NO: 660 - RNA, 17 nt, Hepatitis B virus
uccccaauccccuggga

SEQ ID NO: 661 - RNA, 17 nt, Hepatitis B virus
ccugggauucuuccccg

SEQ ID NO: 662 - RNA, 17 nt, Hepatitis B virus
cugggauucuuccccga

SEQ ID NO: 663 - RNA, 17 nt, Hepatitis B virus
gggauucuuccccgauc

SEQ ID NO: 664 - RNA, 17 nt, Hepatitis B virus
ggauucuuccccgauca

SEQ ID NO: 665 - RNA, 17 nt, Hepatitis B virus
uccccgaucaucaguug

SEQ ID NO: 666 - RNA, 17 nt, Hepatitis B virus
ccgaucaucaguuggac

SEQ ID NO: 667 - RNA, 17 nt, Hepatitis B virus
ucaucaguuggacccug

SEQ ID NO: 668 - RNA, 17 nt, Hepatitis B virus
cccugcauucaaagcca

SEQ ID NO: 669 - RNA, 17 nt, Hepatitis B virus
ccugcauucaaagccaa

SEQ ID NO: 670 - RNA, 17 nt, Hepatitis B virus
agccaacucaguaaauc

SEQ ID NO: 671 - RNA, 17 nt, Hepatitis B virus
aacucaguaaauccaga

SEQ ID NO: 672 - RNA, 17 nt, Hepatitis B virus
caguaaauccagauugg

SEQ ID NO: 673 - RNA, 17 nt, Hepatitis B virus
auccagauugggaccuc

SEQ ID NO: 674 - RNA, 17 nt, Hepatitis B virus
ugggaccucaacccgca

SEQ ID NO: 675 - RNA, 17 nt, Hepatitis B virus
gggagcauucgggccag

SEQ ID NO: 676 - RNA, 17 nt, Hepatitis B virus
ggagcauucgggccagg

SEQ ID NO: 677 - RNA, 17 nt, Hepatitis B virus
gccaggguucaccccuc

SEQ ID NO: 678 - RNA, 17 nt, Hepatitis B virus
ccaggguucaccccucc

SEQ ID NO: 679 - RNA, 17 nt, Hepatitis B virus
ucaccccuccccauggg

SEQ ID NO: 680 - RNA, 17 nt, Hepatitis B virus
gggacuguuggggugga

SEQ ID NO: 681 - RNA, 17 nt, Hepatitis B virus
ggagcccucacgcucag

SEQ ID NO: 682 - RNA, 17 nt, Hepatitis B virus
cucacgcucagggccua

SEQ ID NO: 683 - RNA, 17 nt, Hepatitis B virus
cagggccuacucacaac

SEQ ID NO: 684 - RNA, 17 nt, Hepatitis B virus
ggccuacucacaacugu

SEQ ID NO: 685 - RNA, 17 nt, Hepatitis B virus
cagcagcuccuccuccu

SEQ ID NO: 686 - RNA, 17 nt, Hepatitis B virus
cagcuccuccuccugcc

SEQ ID NO: 687 - RNA, 17 nt, Hepatitis B virus
cuccuccuccugccucc

SEQ ID NO: 688 - RNA, 17 nt, Hepatitis B virus
uccugccuccaccaauc

SEQ ID NO: 689 - RNA, 17 nt, Hepatitis B virus
ccaccaaucggcaguca

SEQ ID NO: 690 - RNA, 17 nt, Hepatitis B virus
ucggcagucaggaaggc

SEQ ID NO: 691 - RNA, 17 nt, Hepatitis B virus
ggcagccuacucccuua

SEQ ID NO: 692 - RNA, 17 nt, Hepatitis B virus
agccuacucccuuaucu

SEQ ID NO: 693 - RNA, 17 nt, Hepatitis B virus
uacucccuuaucuccac

SEQ ID NO: 694 - RNA, 17 nt, Hepatitis B virus
acucccuuaucuccacc

SEQ ID NO: 695 - RNA, 17 nt, Hepatitis B virus
ucccuuaucuccaccuc

SEQ ID NO: 696 - RNA, 17 nt, Hepatitis B virus
ccuuaucuccaccucua

SEQ ID NO: 697 - RNA, 17 nt, Hepatitis B virus
cuccaccucuaagggac

SEQ ID NO: 698 - RNA, 17 nt, Hepatitis B virus
ccaccucuaagggacac

SEQ ID NO: 699 - RNA, 17 nt, Hepatitis B virus
gggacacucauccucag

SEQ ID NO: 700 - RNA, 17 nt, Hepatitis B virus
acacucauccucaggcc

SEQ ID NO: 701 - RNA, 17 nt, Hepatitis B virus
cucauccucaggccaug

SEQ ID NO: 702 - RNA, 17 nt, Hepatitis B virus
aacuccaccacuuucca

SEQ ID NO: 703 - RNA, 17 nt, Hepatitis B virus
acuccaccacuuuccac

SEQ ID NO: 704 - RNA, 17 nt, Hepatitis B virus
uccaccacuuuccacca

SEQ ID NO: 705 - RNA, 17 nt, Hepatitis B virus
ccacuuuccaccaaacu

SEQ ID NO: 706 - RNA, 17 nt, Hepatitis B virus
cacuuuccaccaaacuc

SEQ ID NO: 707 - RNA, 17 nt, Hepatitis B virus
cuuuccaccaaacucuu

SEQ ID NO: 708 - RNA, 17 nt, Hepatitis B virus
uuuccaccaaacucuuc

SEQ ID NO: 709 - RNA, 17 nt, Hepatitis B virus
caccaaacucuucaaga

SEQ ID NO: 710 - RNA, 17 nt, Hepatitis B virus
ccaaacucuucaagauc

SEQ ID NO: 711 - RNA, 17 nt, Hepatitis B virus
aacucuucaagauccca

SEQ ID NO: 712 - RNA, 17 nt, Hepatitis B virus
ucaagaucccagaguca

SEQ ID NO: 713 - RNA, 17 nt, Hepatitis B virus
caagaucccagagucag

SEQ ID NO: 714 - RNA, 17 nt, Hepatitis B virus
aagaucccagagucagg

SEQ ID NO: 715 - RNA, 17 nt, Hepatitis B virus
ccagagucagggcccug

SEQ ID NO: 716 - RNA, 17 nt, Hepatitis B virus
gucagggcccuguacuu

SEQ ID NO: 717 - RNA, 17 nt, Hepatitis B virus
ucagggcccuguacuuu

SEQ ID NO: 718 - RNA, 17 nt, Hepatitis B virus
cagggcccuguacuuuc

SEQ ID NO: 719 - RNA, 17 nt, Hepatitis B virus
cccuguacuuuccugcu

SEQ ID NO: 720 - RNA, 17 nt, Hepatitis B virus
guacuuuccugcuggug

SEQ ID NO: 721 - RNA, 17 nt, Hepatitis B virus
uacuuuccugcuggugg

SEQ ID NO: 722 - RNA, 17 nt, Hepatitis B virus
uuuccugcugguggcuc

SEQ ID NO: 723 - RNA, 17 nt, Hepatitis B virus
cugguggcuccaguuca

SEQ ID NO: 724 - RNA, 17 nt, Hepatitis B virus
gguggcuccaguucagg

SEQ ID NO: 725 - RNA, 17 nt, Hepatitis B virus
guggcuccaguucagga

SEQ ID NO: 726 - RNA, 17 nt, Hepatitis B virus
uccaguucaggaacagu

SEQ ID NO: 727 - RNA, 17 nt, Hepatitis B virus
ucaggaacagugagccc

SEQ ID NO: 728 - RNA, 17 nt, Hepatitis B virus
cagugagcccugcucag

SEQ ID NO: 729 - RNA, 17 nt, Hepatitis B virus
agugagcccugcucaga

SEQ ID NO: 730 - RNA, 17 nt, Hepatitis B virus
gugagcccugcucagaa

SEQ ID NO: 731 - RNA, 17 nt, Hepatitis B virus
agcccugcucagaauac

SEQ ID NO: 732 - RNA, 17 nt, Hepatitis B virus
cccugcucagaauacug

SEQ ID NO: 733 - RNA, 17 nt, Hepatitis B virus
cagaauacugucucugc

SEQ ID NO: 734 - RNA, 17 nt, Hepatitis B virus
auacugucucugccaua

SEQ ID NO: 735 - RNA, 17 nt, Hepatitis B virus
acugucucugccauauc

SEQ ID NO: 736 - RNA, 17 nt, Hepatitis B virus
gucucugccauaucguc

SEQ ID NO: 737 - RNA, 17 nt, Hepatitis B virus
ucucugccauaucguca

SEQ ID NO: 738 - RNA, 17 nt, Hepatitis B virus
auaucgucaaucuuauc

SEQ ID NO: 739 - RNA, 17 nt, Hepatitis B virus
cgucaaucuuaucgaag

SEQ ID NO: 740 - RNA, 17 nt, Hepatitis B virus
ucgaagacuggggaccc

SEQ ID NO: 741 - RNA, 17 nt, Hepatitis B virus
cuggggacccuguaccg

SEQ ID NO: 742 - RNA, 17 nt, Hepatitis B virus
uggggacccuguaccga

SEQ ID NO: 743 - RNA, 17 nt, Hepatitis B virus
ggggacccuguaccgaa

SEQ ID NO: 744 - RNA, 17 nt, Hepatitis B virus
cccuguaccgaacaugg

SEQ ID NO: 745 - RNA, 17 nt, Hepatitis B virus
uaccgaacauggagaac

SEQ ID NO: 746 - RNA, 17 nt, Hepatitis B virus
uggagaacaucgcauca

SEQ ID NO: 747 - RNA, 17 nt, Hepatitis B virus
aacaucgcaucaggacu

SEQ ID NO: 748 - RNA, 17 nt, Hepatitis B virus
aucgcaucaggacuccu

SEQ ID NO: 749 - RNA, 17 nt, Hepatitis B virus
aucaggacuccuaggac

SEQ ID NO: 750 - RNA, 17 nt, Hepatitis B virus
caggacuccuaggaccc

SEQ ID NO: 751 - RNA, 17 nt, Hepatitis B virus
aggacuccuaggacccc

SEQ ID NO: 752 - RNA, 17 nt, Hepatitis B virus
ccuaggaccccugcucg

SEQ ID NO: 753 - RNA, 17 nt, Hepatitis B virus
cuaggaccccugcucgu

SEQ ID NO: 754 - RNA, 17 nt, Hepatitis B virus
uaggaccccugcucgug

SEQ ID NO: 755 - RNA, 17 nt, Hepatitis B virus
aggaccccugcucgugu

SEQ ID NO: 756 - RNA, 17 nt, Hepatitis B virus
accccugcucguguuac

SEQ ID NO: 757 - RNA, 17 nt, Hepatitis B virus
cguguuacaggcggggu

SEQ ID NO: 758 - RNA, 17 nt, Hepatitis B virus
gguuuuucuuguugaca

SEQ ID NO: 759 - RNA, 17 nt, Hepatitis B virus
uuguugacaaaaauccu

SEQ ID NO: 760 - RNA, 17 nt, Hepatitis B virus
caaaaauccucacaaua

SEQ ID NO: 761 - RNA, 17 nt, Hepatitis B virus
aaaaauccucacaauac

SEQ ID NO: 762 - RNA, 17 nt, Hepatitis B virus
aaauccucacaauacca

SEQ ID NO: 763 - RNA, 17 nt, Hepatitis B virus
auccucacaauaccaca

SEQ ID NO: 764 - RNA, 17 nt, Hepatitis B virus
cacaauaccacagaguc

SEQ ID NO: 765 - RNA, 17 nt, Hepatitis B virus
acaauaccacagagucu

SEQ ID NO: 766 - RNA, 17 nt, Hepatitis B virus
aauaccacagagucuag

SEQ ID NO: 767 - RNA, 17 nt, Hepatitis B virus
acagagucuagacucgu

SEQ ID NO: 768 - RNA, 17 nt, Hepatitis B virus
gucuagacucguggugg

SEQ ID NO: 769 - RNA, 17 nt, Hepatitis B virus
ugguggacuucucucaa

SEQ ID NO: 770 - RNA, 17 nt, Hepatitis B virus
uggacuucucucaauuu

SEQ ID NO: 771 - RNA, 17 nt, Hepatitis B virus
gacuucucucaauuuuc

SEQ ID NO: 772 - RNA, 17 nt, Hepatitis B virus
cuucucucaauuuucua

SEQ ID NO: 773 - RNA, 17 nt, Hepatitis B virus
caauuuucuagggggaa

SEQ ID NO: 774 - RNA, 17 nt, Hepatitis B virus
gggggaacacccgugug

SEQ ID NO: 775 - RNA, 17 nt, Hepatitis B virus
gggaacacccguguguc

SEQ ID NO: 776 - RNA, 17 nt, Hepatitis B virus
ggaacacccgugugucu

SEQ ID NO: 777 - RNA, 17 nt, Hepatitis B virus
cgugugucuuggccaaa

SEQ ID NO: 778 - RNA, 17 nt, Hepatitis B virus
gucuuggccaaaauucg

SEQ ID NO: 779 - RNA, 17 nt, Hepatitis B virus
ucuuggccaaaauucgc

SEQ ID NO: 780 - RNA, 17 nt, Hepatitis B virus
aaauucgcagucccaaa

SEQ ID NO: 781 - RNA, 17 nt, Hepatitis B virus
ucgcagucccaaaucuc

SEQ ID NO: 782 - RNA, 17 nt, Hepatitis B virus
cgcagucccaaaucucc

SEQ ID NO: 783 - RNA, 17 nt, Hepatitis B virus
gcagucccaaaucucca

SEQ ID NO: 784 - RNA, 17 nt, Hepatitis B virus
cccaaaucuccagucac

SEQ ID NO: 785 - RNA, 17 nt, Hepatitis B virus
caaaucuccagucacuc

SEQ ID NO: 786 - RNA, 17 nt, Hepatitis B virus
aaaucuccagucacuca

SEQ ID NO: 787 - RNA, 17 nt, Hepatitis B virus
cuccagucacucaccaa

SEQ ID NO: 788 - RNA, 17 nt, Hepatitis B virus
ccagucacucaccaacc

SEQ ID NO: 789 - RNA, 17 nt, Hepatitis B virus
agucacucaccaaccug

SEQ ID NO: 790 - RNA, 17 nt, Hepatitis B virus
ucacucaccaaccuguu

SEQ ID NO: 791 - RNA, 17 nt, Hepatitis B virus
cacucaccaaccuguug

SEQ ID NO: 792 - RNA, 17 nt, Hepatitis B virus
ucaccaaccuguugucc

SEQ ID NO: 793 - RNA, 17 nt, Hepatitis B virus
caccaaccuguuguccu

SEQ ID NO: 794 - RNA, 17 nt, Hepatitis B virus
cuguuguccuccaauuu

SEQ ID NO: 795 - RNA, 17 nt, Hepatitis B virus
uguuguccuccaauuug

SEQ ID NO: 796 - RNA, 17 nt, Hepatitis B virus
uuguccuccaauuuguc

SEQ ID NO: 797 - RNA, 17 nt, Hepatitis B virus
uguccuccaauuugucc

SEQ ID NO: 798 - RNA, 17 nt, Hepatitis B virus
aauuuguccugguuauc

SEQ ID NO: 799 - RNA, 17 nt, Hepatitis B virus
auuuguccugguuaucg

SEQ ID NO: 800 - RNA, 17 nt, Hepatitis B virus
guuaucgcuggaugugu

SEQ ID NO: 801 - RNA, 17 nt, Hepatitis B virus
gaugugucugcggcguu

SEQ ID NO: 802 - RNA, 17 nt, Hepatitis B virus
guuuuaucaucuuccuc

SEQ ID NO: 803 - RNA, 17 nt, Hepatitis B virus
uuaucaucuuccucugc

SEQ ID NO: 804 - RNA, 17 nt, Hepatitis B virus
ucaucuuccucugcauc

SEQ ID NO: 805 - RNA, 17 nt, Hepatitis B virus
caucuuccucugcaucc

SEQ ID NO: 806 - RNA, 17 nt, Hepatitis B virus
ucuuccucugcauccug

SEQ ID NO: 807 - RNA, 17 nt, Hepatitis B virus
uccucugcauccugcug

SEQ ID NO: 808 - RNA, 17 nt, Hepatitis B virus
ucugcauccugcugcua

SEQ ID NO: 809 - RNA, 17 nt, Hepatitis B virus
cugcauccugcugcuau

SEQ ID NO: 810 - RNA, 17 nt, Hepatitis B virus
cauccugcugcuaugcc

SEQ ID NO: 811 - RNA, 17 nt, Hepatitis B virus
ccugcugcuaugccuca

SEQ ID NO: 812 - RNA, 17 nt, Hepatitis B virus
ugcuaugccucaucuuc

SEQ ID NO: 813 - RNA, 17 nt, Hepatitis B virus
gcuaugccucaucuucu

SEQ ID NO: 814 - RNA, 17 nt, Hepatitis B virus
uaugccucaucuucuug

SEQ ID NO: 815 - RNA, 17 nt, Hepatitis B virus
gccucaucuucuuguug

SEQ ID NO: 816 - RNA, 17 nt, Hepatitis B virus
ucaucuucuuguugguu

SEQ ID NO: 817 - RNA, 17 nt, Hepatitis B virus
guugguucuucuggacu

SEQ ID NO: 818 - RNA, 17 nt, Hepatitis B virus
gguucuucuggacuauc

SEQ ID NO: 819 - RNA, 17 nt, Hepatitis B virus
uucuggacuaucaaggu

SEQ ID NO: 820 - RNA, 17 nt, Hepatitis B virus
ggacuaucaagguaugu

SEQ ID NO: 821 - RNA, 17 nt, Hepatitis B virus
uauguugcccguuuguc

SEQ ID NO: 822 - RNA, 17 nt, Hepatitis B virus
auguugcccguuugucc

SEQ ID NO: 823 - RNA, 17 nt, Hepatitis B virus
cguuuguccucuaauuc

SEQ ID NO: 824 - RNA, 17 nt, Hepatitis B virus
guuuguccucuaauucc

SEQ ID NO: 825 - RNA, 17 nt, Hepatitis B virus
uuguccucuaauuccag

SEQ ID NO: 826 - RNA, 17 nt, Hepatitis B virus
ucuaauuccaggaucau

SEQ ID NO: 827 - RNA, 17 nt, Hepatitis B virus
cuaauuccaggaucauc

SEQ ID NO: 828 - RNA, 17 nt, Hepatitis B virus
ccaggaucaucaacaac

SEQ ID NO: 829 - RNA, 17 nt, Hepatitis B virus
ggaucaucaacaaccag

SEQ ID NO: 830 - RNA, 17 nt, Hepatitis B virus
ucaucaacaaccagcac

SEQ ID NO: 831 - RNA, 17 nt, Hepatitis B virus
ucaacaaccagcaccgg

SEQ ID NO: 832 - RNA, 17 nt, Hepatitis B virus
caacaaccagcaccgga

SEQ ID NO: 833 - RNA, 17 nt, Hepatitis B virus
caaccagcaccggacca

SEQ ID NO: 834 - RNA, 17 nt, Hepatitis B virus
accagcaccggaccaug

SEQ ID NO: 835 - RNA, 17 nt, Hepatitis B virus
caccggaccaugcaaaa

SEQ ID NO: 836 - RNA, 17 nt, Hepatitis B virus
accggaccaugcaaaac

SEQ ID NO: 837 - RNA, 17 nt, Hepatitis B virus
gaccaugcaaaaccugc

SEQ ID NO: 838 - RNA, 17 nt, Hepatitis B virus
ugcaaaaccugcacaac

SEQ ID NO: 839 - RNA, 17 nt, Hepatitis B virus
gcaaaaccugcacaacu

SEQ ID NO: 840 - RNA, 17 nt, Hepatitis B virus
aaaccugcacaacuccu

SEQ ID NO: 841 - RNA, 17 nt, Hepatitis B virus
accugcacaacuccugc

SEQ ID NO: 842 - RNA, 17 nt, Hepatitis B virus
ugcacaacuccugcuca

SEQ ID NO: 843 - RNA, 17 nt, Hepatitis B virus
cacaacuccugcucaag

SEQ ID NO: 844 - RNA, 17 nt, Hepatitis B virus
acaacuccugcucaagg

SEQ ID NO: 845 - RNA, 17 nt, Hepatitis B virus
acuccugcucaaggaac

SEQ ID NO: 846 - RNA, 17 nt, Hepatitis B virus
uccugcucaaggaaccu

SEQ ID NO: 847 - RNA, 17 nt, Hepatitis B virus
caaggaaccucuauguu

SEQ ID NO: 848 - RNA, 17 nt, Hepatitis B virus
aaggaaccucuauguuu

SEQ ID NO: 849 - RNA, 17 nt, Hepatitis B virus
ggaaccucuauguuucc

SEQ ID NO: 850 - RNA, 17 nt, Hepatitis B virus
uauguuucccucauguu

SEQ ID NO: 851 - RNA, 17 nt, Hepatitis B virus
auguuucccucauguug

SEQ ID NO: 852 - RNA, 17 nt, Hepatitis B virus
uguuucccucauguugc

SEQ ID NO: 853 - RNA, 17 nt, Hepatitis B virus
uuucccucauguugcug

SEQ ID NO: 854 - RNA, 17 nt, Hepatitis B virus
cauguugcuguacaaaa

SEQ ID NO: 855 - RNA, 17 nt, Hepatitis B virus
ugcuguacaaaaccuac

SEQ ID NO: 856 - RNA, 17 nt, Hepatitis B virus
uacaaaaccuacggacg

SEQ ID NO: 857 - RNA, 17 nt, Hepatitis B virus
acaaaaccuacggacgg

SEQ ID NO: 858 - RNA, 17 nt, Hepatitis B virus
acggaaacugcaccugu

SEQ ID NO: 859 - RNA, 17 nt, Hepatitis B virus
gaaacugcaccuguauu

SEQ ID NO: 860 - RNA, 17 nt, Hepatitis B virus
aacugcaccuguauucc

SEQ ID NO: 861 - RNA, 17 nt, Hepatitis B virus
acugcaccuguauuccc

SEQ ID NO: 862 - RNA, 17 nt, Hepatitis B virus
cuguauucccaucccau

SEQ ID NO: 863 - RNA, 17 nt, Hepatitis B virus
uguauucccaucccauc

SEQ ID NO: 864 - RNA, 17 nt, Hepatitis B virus
guauucccaucccauca

SEQ ID NO: 865 - RNA, 17 nt, Hepatitis B virus
uucccaucccaucaucu

SEQ ID NO: 866 - RNA, 17 nt, Hepatitis B virus
ucccaucccaucaucuu

SEQ ID NO: 867 - RNA, 17 nt, Hepatitis B virus
cccaucccaucaucuug

SEQ ID NO: 868 - RNA, 17 nt, Hepatitis B virus
aucccaucaucuugggc

SEQ ID NO: 869 - RNA, 17 nt, Hepatitis B virus
ccaucaucuugggcuuu

SEQ ID NO: 870 - RNA, 17 nt, Hepatitis B virus
ucuugggcuuucgcaaa

SEQ ID NO: 871 - RNA, 17 nt, Hepatitis B virus
gcuuucgcaaaauaccu

SEQ ID NO: 872 - RNA, 17 nt, Hepatitis B virus
caaaauaccuaugggag

SEQ ID NO: 873 - RNA, 17 nt, Hepatitis B virus
aaaauaccuaugggagu

SEQ ID NO: 874 - RNA, 17 nt, Hepatitis B virus
gagugggccucaguccg

SEQ ID NO: 875 - RNA, 17 nt, Hepatitis B virus
agugggccucaguccgu

SEQ ID NO: 876 - RNA, 17 nt, Hepatitis B virus
ugggccucaguccguuu

SEQ ID NO: 877 - RNA, 17 nt, Hepatitis B virus
ccucaguccguuucucu

SEQ ID NO: 878 - RNA, 17 nt, Hepatitis B virus
uccguuucucuuggcuc

SEQ ID NO: 879 - RNA, 17 nt, Hepatitis B virus
cguuucucuuggcucag

SEQ ID NO: 880 - RNA, 17 nt, Hepatitis B virus
cucuuggcucaguuuac

SEQ ID NO: 881 - RNA, 17 nt, Hepatitis B virus
cuuggcucaguuuacua

SEQ ID NO: 882 - RNA, 17 nt, Hepatitis B virus
caguuuacuagugccau

SEQ ID NO: 883 - RNA, 17 nt, Hepatitis B virus
acuagugccauuuguuc

SEQ ID NO: 884 - RNA, 17 nt, Hepatitis B virus
cuagugccauuuguuca

SEQ ID NO: 885 - RNA, 17 nt, Hepatitis B virus
auuuguucagugguucg

SEQ ID NO: 886 - RNA, 17 nt, Hepatitis B virus
cguagggcuuuccccca

SEQ ID NO: 887 - RNA, 17 nt, Hepatitis B virus
gggcuuucccccacugu

SEQ ID NO: 888 - RNA, 17 nt, Hepatitis B virus
ggcuuucccccacuguc

SEQ ID NO: 889 - RNA, 17 nt, Hepatitis B virus
gcuuucccccacugucu

SEQ ID NO: 890 - RNA, 17 nt, Hepatitis B virus
cuuucccccacugucug

SEQ ID NO: 891 - RNA, 17 nt, Hepatitis B virus
uuucccccacugucugg

SEQ ID NO: 892 - RNA, 17 nt, Hepatitis B virus
ucccccacugucuggcu

SEQ ID NO: 893 - RNA, 17 nt, Hepatitis B virus
ccacugucuggcuuuca

SEQ ID NO: 894 - RNA, 17 nt, Hepatitis B virus
ugucuggcuuucaguua

SEQ ID NO: 895 - RNA, 17 nt, Hepatitis B virus
uggcuuucaguuauaug

SEQ ID NO: 896 - RNA, 17 nt, Hepatitis B virus
uugggggccaagucugu

SEQ ID NO: 897 - RNA, 17 nt, Hepatitis B virus
ugggggccaagucugua

SEQ ID NO: 898 - RNA, 17 nt, Hepatitis B virus
gccaagucuguacaaca

SEQ ID NO: 899 - RNA, 17 nt, Hepatitis B virus
gucuguacaacaucuug

SEQ ID NO: 900 - RNA, 17 nt, Hepatitis B virus
uguacaacaucuugagu

SEQ ID NO: 901 - RNA, 17 nt, Hepatitis B virus
acaacaucuugaguccc

SEQ ID NO: 902 - RNA, 17 nt, Hepatitis B virus
cuugagucccuuuaugc

SEQ ID NO: 903 - RNA, 17 nt, Hepatitis B virus
uugagucccuuuaugcc

SEQ ID NO: 904 - RNA, 17 nt, Hepatitis B virus
ugagucccuuuaugccg

SEQ ID NO: 905 - RNA, 17 nt, Hepatitis B virus
cuuuaugccgcuguuac

SEQ ID NO: 906 - RNA, 17 nt, Hepatitis B virus
uaugccgcuguuaccaa

SEQ ID NO: 907 - RNA, 17 nt, Hepatitis B virus
gcuguuaccaauuuucu

SEQ ID NO: 908 - RNA, 17 nt, Hepatitis B virus
cuguuaccaauuuucuu

SEQ ID NO: 909 - RNA, 17 nt, Hepatitis B virus
caauuuucuuuugucuu

SEQ ID NO: 910 - RNA, 17 nt, Hepatitis B virus
cuuuugucuuuggguau

SEQ ID NO: 911 - RNA, 17 nt, Hepatitis B virus
ggguauacauuuaaacc

SEQ ID NO: 912 - RNA, 17 nt, Hepatitis B virus
auuuaaacccucacaaa

SEQ ID NO: 913 - RNA, 17 nt, Hepatitis B virus
uuuaaacccucacaaaa

SEQ ID NO: 914 - RNA, 17 nt, Hepatitis B virus
uuaaacccucacaaaac

SEQ ID NO: 915 - RNA, 17 nt, Hepatitis B virus
aaacccucacaaaacaa

SEQ ID NO: 916 - RNA, 17 nt, Hepatitis B virus
acccucacaaaacaaaa

SEQ ID NO: 917 - RNA, 17 nt, Hepatitis B virus
cacaaaacaaaaagaug

SEQ ID NO: 918 - RNA, 17 nt, Hepatitis B virus
ggauauucccuuaacuu

SEQ ID NO: 919 - RNA, 17 nt, Hepatitis B virus
gauauucccuuaacuuc

SEQ ID NO: 920 - RNA, 17 nt, Hepatitis B virus
auauucccuuaacuuca

SEQ ID NO: 921 - RNA, 17 nt, Hepatitis B virus
cccuuaacuucauggga

SEQ ID NO: 922 - RNA, 17 nt, Hepatitis B virus
uuaacuucaugggauau

SEQ ID NO: 923 - RNA, 17 nt, Hepatitis B virus
guuggggcacauugcca

SEQ ID NO: 924 - RNA, 17 nt, Hepatitis B virus
uggggcacauugccaca

SEQ ID NO: 925 - RNA, 17 nt, Hepatitis B virus
cacauugccacaggaac

SEQ ID NO: 926 - RNA, 17 nt, Hepatitis B virus
acauugccacaggaaca

SEQ ID NO: 927 - RNA, 17 nt, Hepatitis B virus
auugccacaggaacaua

SEQ ID NO: 928 - RNA, 17 nt, Hepatitis B virus
acaggaacauauuguac

SEQ ID NO: 929 - RNA, 17 nt, Hepatitis B virus
uauuguacaaaaaauca

SEQ ID NO: 930 - RNA, 17 nt, Hepatitis B virus
aaaaaaucaaaaugugu

SEQ ID NO: 931 - RNA, 17 nt, Hepatitis B virus
uaggaaacuuccuguaa

SEQ ID NO: 932 - RNA, 17 nt, Hepatitis B virus
gaaacuuccuguaaaca

SEQ ID NO: 933 - RNA, 17 nt, Hepatitis B virus
aaacuuccuguaaacag

SEQ ID NO: 934 - RNA, 17 nt, Hepatitis B virus
cuguaaacaggccuauu

SEQ ID NO: 935 - RNA, 17 nt, Hepatitis B virus
aaacaggccuauugauu

SEQ ID NO: 936 - RNA, 17 nt, Hepatitis B virus
aacaggccuauugauug

SEQ ID NO: 937 - RNA, 17 nt, Hepatitis B virus
aguaugucaacgaauug

SEQ ID NO: 938 - RNA, 17 nt, Hepatitis B virus
ugugggucuuuuggggu

SEQ ID NO: 939 - RNA, 17 nt, Hepatitis B virus
ggguuugccgccccuuu

SEQ ID NO: 940 - RNA, 17 nt, Hepatitis B virus
uuugccgccccuuucac

SEQ ID NO: 941 - RNA, 17 nt, Hepatitis B virus
uugccgccccuuucacg

SEQ ID NO: 942 - RNA, 17 nt, Hepatitis B virus
ugccgccccuuucacgc

SEQ ID NO: 943 - RNA, 17 nt, Hepatitis B virus
gccgccccuuucacgca

SEQ ID NO: 944 - RNA, 17 nt, Hepatitis B virus
ccccuuucacgcaaugu

SEQ ID NO: 945 - RNA, 17 nt, Hepatitis B virus
uuucacgcaauguggau

SEQ ID NO: 946 - RNA, 17 nt, Hepatitis B virus
ggauauucugcuuuaau

SEQ ID NO: 947 - RNA, 17 nt, Hepatitis B virus
uauucugcuuuaaugcc

SEQ ID NO: 948 - RNA, 17 nt, Hepatitis B virus
uuuaaugccuuuauaug

SEQ ID NO: 949 - RNA, 17 nt, Hepatitis B virus
uuaaugccuuuauaugc

SEQ ID NO: 950 - RNA, 17 nt, Hepatitis B virus
uuauaugcaugcauaca

SEQ ID NO: 951 - RNA, 17 nt, Hepatitis B virus
augcaugcauacaagca

SEQ ID NO: 952 - RNA, 17 nt, Hepatitis B virus
augcauacaagcaaaac

SEQ ID NO: 953 - RNA, 17 nt, Hepatitis B virus
auacaagcaaaacaggc

SEQ ID NO: 954 - RNA, 17 nt, Hepatitis B virus
agcaaaacaggcuuuua

SEQ ID NO: 955 - RNA, 17 nt, Hepatitis B virus
aaacaggcuuuuacuuu

SEQ ID NO: 956 - RNA, 17 nt, Hepatitis B virus
gcuuuuacuuucucgcc

SEQ ID NO: 957 - RNA, 17 nt, Hepatitis B virus
uuacuuucucgccaacu

SEQ ID NO: 958 - RNA, 17 nt, Hepatitis B virus
uuucucgccaacuuaca

SEQ ID NO: 959 - RNA, 17 nt, Hepatitis B virus
uucucgccaacuuacaa

SEQ ID NO: 960 - RNA, 17 nt, Hepatitis B virus
ucgccaacuuacaaggc

SEQ ID NO: 961 - RNA, 17 nt, Hepatitis B virus
caacuuacaaggccuuu

SEQ ID NO: 962 - RNA, 17 nt, Hepatitis B virus
uacaaggccuuucuaag

SEQ ID NO: 963 - RNA, 17 nt, Hepatitis B virus
acaaggccuuucuaagu

SEQ ID NO: 964 - RNA, 17 nt, Hepatitis B virus
ggccuuucuaaguaaac

SEQ ID NO: 965 - RNA, 17 nt, Hepatitis B virus
aaguaaacaguauguga

SEQ ID NO: 966 - RNA, 17 nt, Hepatitis B virus
augugaaccuuuacccc

SEQ ID NO: 967 - RNA, 17 nt, Hepatitis B virus
ugugaaccuuuaccccg

SEQ ID NO: 968 - RNA, 17 nt, Hepatitis B virus
accuuuaccccguugcu

SEQ ID NO: 969 - RNA, 17 nt, Hepatitis B virus
ccuuuaccccguugcuc

SEQ ID NO: 970 - RNA, 17 nt, Hepatitis B virus
cuuuaccccguugcucg

SEQ ID NO: 971 - RNA, 17 nt, Hepatitis B virus
cccguugcucggcaacg

SEQ ID NO: 972 - RNA, 17 nt, Hepatitis B virus
ugcucggcaacggccug

SEQ ID NO: 973 - RNA, 17 nt, Hepatitis B virus
gcaacggccuggucuau

SEQ ID NO: 974 - RNA, 17 nt, Hepatitis B virus
caacggccuggucuaug

SEQ ID NO: 975 - RNA, 17 nt, Hepatitis B virus
gccuggucuaugccaag

SEQ ID NO: 976 - RNA, 17 nt, Hepatitis B virus
gucuaugccaaguguuu

SEQ ID NO: 977 - RNA, 17 nt, Hepatitis B virus
ucuaugccaaguguuug

SEQ ID NO: 978 - RNA, 17 nt, Hepatitis B virus
guguuugcugacgcaac

SEQ ID NO: 979 - RNA, 17 nt, Hepatitis B virus
gcugacgcaacccccac

SEQ ID NO: 980 - RNA, 17 nt, Hepatitis B virus
gacgcaacccccacugg

SEQ ID NO: 981 - RNA, 17 nt, Hepatitis B virus
acgcaacccccacuggu

SEQ ID NO: 982 - RNA, 17 nt, Hepatitis B virus
cgcaacccccacugguu

SEQ ID NO: 983 - RNA, 17 nt, Hepatitis B virus
gcaacccccacugguug

SEQ ID NO: 984 - RNA, 17 nt, Hepatitis B virus
caacccccacugguugg

SEQ ID NO: 985 - RNA, 17 nt, Hepatitis B virus
acccccacugguugggg

SEQ ID NO: 986 - RNA, 17 nt, Hepatitis B virus
guuggggcuuggccaua

SEQ ID NO: 987 - RNA, 17 nt, Hepatitis B virus
ggcuuggccauaggcca

SEQ ID NO: 988 - RNA, 17 nt, Hepatitis B virus
gcuuggccauaggccau

SEQ ID NO: 989 - RNA, 17 nt, Hepatitis B virus
ccauaggccaucagcgc

SEQ ID NO: 990 - RNA, 17 nt, Hepatitis B virus
cauaggccaucagcgca

SEQ ID NO: 991 - RNA, 17 nt, Hepatitis B virus
aggccaucagcgcaugc

SEQ ID NO: 992 - RNA, 17 nt, Hepatitis B virus
aucagcgcaugcgugga

SEQ ID NO: 993 - RNA, 17 nt, Hepatitis B virus
cguggaaccuuuguguc

SEQ ID NO: 994 - RNA, 17 nt, Hepatitis B virus
guggaaccuuugugucu

SEQ ID NO: 995 - RNA, 17 nt, Hepatitis B virus
uuugugucuccucugcc

SEQ ID NO: 996 - RNA, 17 nt, Hepatitis B virus
ugugucuccucugccga

SEQ ID NO: 997 - RNA, 17 nt, Hepatitis B virus
gugucuccucugccgau

SEQ ID NO: 998 - RNA, 17 nt, Hepatitis B virus
gucuccucugccgaucc

SEQ ID NO: 999 - RNA, 17 nt, Hepatitis B virus
uccucugccgauccaua

SEQ ID NO: 1000 - RNA, 17 nt, Hepatitis B virus
ugccgauccauaccgcg

SEQ ID NO: 1001 - RNA, 17 nt, Hepatitis B virus
gccgauccauaccgcgg

SEQ ID NO: 1002 - RNA, 17 nt, Hepatitis B virus
auccauaccgcggaacu

SEQ ID NO: 1003 - RNA, 17 nt, Hepatitis B virus
cgcggaacuccuagccg

SEQ ID NO: 1004 - RNA, 17 nt, Hepatitis B virus
cggaacuccuagccgcu

SEQ ID NO: 1005 - RNA, 17 nt, Hepatitis B virus
ggaacuccuagccgcuu

SEQ ID NO: 1006 - RNA, 17 nt, Hepatitis B virus
cuccuagccgcuuguuu

SEQ ID NO: 1007 - RNA, 17 nt, Hepatitis B virus
cuagccgcuuguuuugc

SEQ ID NO: 1008 - RNA, 17 nt, Hepatitis B virus
uguuuugcucgcagcag

SEQ ID NO: 1009 - RNA, 17 nt, Hepatitis B virus
uugcucgcagcaggucu

SEQ ID NO: 1010 - RNA, 17 nt, Hepatitis B virus
cucgcagcaggucuggg

SEQ ID NO: 1011 - RNA, 17 nt, Hepatitis B virus
agcaggucuggggcaaa

SEQ ID NO: 1012 - RNA, 17 nt, Hepatitis B virus
ucuggggcaaaacucau

SEQ ID NO: 1013 - RNA, 17 nt, Hepatitis B virus
ggcaaaacucaucggga

SEQ ID NO: 1014 - RNA, 17 nt, Hepatitis B virus
caaaacucaucgggacu

SEQ ID NO: 1015 - RNA, 17 nt, Hepatitis B virus
aucgggacugacaauuc

SEQ ID NO: 1016 - RNA, 17 nt, Hepatitis B virus
ggacugacaauucuguc

SEQ ID NO: 1017 - RNA, 17 nt, Hepatitis B virus
gacaauucugucgugcu

SEQ ID NO: 1018 - RNA, 17 nt, Hepatitis B virus
ugucgugcucucccgca

SEQ ID NO: 1019 - RNA, 17 nt, Hepatitis B virus
ucgugcucucccgcaaa

SEQ ID NO: 1020 - RNA, 17 nt, Hepatitis B virus
gugcucucccgcaaaua

SEQ ID NO: 1021 - RNA, 17 nt, Hepatitis B virus
ugcucucccgcaaauau

SEQ ID NO: 1022 - RNA, 17 nt, Hepatitis B virus
ucucccgcaaauauaca

SEQ ID NO: 1023 - RNA, 17 nt, Hepatitis B virus
aaauauacaucauuucc

SEQ ID NO: 1024 - RNA, 17 nt, Hepatitis B virus
uauacaucauuuccaug

SEQ ID NO: 1025 - RNA, 17 nt, Hepatitis B virus
aucauuuccauggcugc

SEQ ID NO: 1026 - RNA, 17 nt, Hepatitis B virus
ucauuuccauggcugcu

SEQ ID NO: 1027 - RNA, 17 nt, Hepatitis B virus
uccauggcugcuaggcu

SEQ ID NO: 1028 - RNA, 17 nt, Hepatitis B virus
auggcugcuaggcugug

SEQ ID NO: 1029 - RNA, 17 nt, Hepatitis B virus
ugcuaggcugugcugcc

SEQ ID NO: 1030 - RNA, 17 nt, Hepatitis B virus
ggcugugcugccaacug

SEQ ID NO: 1031 - RNA, 17 nt, Hepatitis B virus
ugugcugccaacuggau

SEQ ID NO: 1032 - RNA, 17 nt, Hepatitis B virus
gugcugccaacuggauc

SEQ ID NO: 1033 - RNA, 17 nt, Hepatitis B virus
cugccaacuggauccua

SEQ ID NO: 1034 - RNA, 17 nt, Hepatitis B virus
acuggauccuacgcggg

SEQ ID NO: 1035 - RNA, 17 nt, Hepatitis B virus
cuggauccuacgcggga

SEQ ID NO: 1036 - RNA, 17 nt, Hepatitis B virus
gggacguccuuuguuua

SEQ ID NO: 1037 - RNA, 17 nt, Hepatitis B virus
ggacguccuuuguuuac

SEQ ID NO: 1038 - RNA, 17 nt, Hepatitis B virus
uuuacgucccgucggcg

SEQ ID NO: 1039 - RNA, 17 nt, Hepatitis B virus
uuacgucccgucggcgc

SEQ ID NO: 1040 - RNA, 17 nt, Hepatitis B virus
gucggcgcugaaucccg

SEQ ID NO: 1041 - RNA, 17 nt, Hepatitis B virus
gcugaaucccgcggacg

SEQ ID NO: 1042 - RNA, 17 nt, Hepatitis B virus
cugaaucccgcggacga

SEQ ID NO: 1043 - RNA, 17 nt, Hepatitis B virus
cggacgaccccucccgg

SEQ ID NO: 1044 - RNA, 17 nt, Hepatitis B virus
ggacgaccccucccggg

SEQ ID NO: 1045 - RNA, 17 nt, Hepatitis B virus
gacgaccccucccgggg

SEQ ID NO: 1046 - RNA, 17 nt, Hepatitis B virus
acgaccccucccggggc

SEQ ID NO: 1047 - RNA, 17 nt, Hepatitis B virus
gaccccucccggggccg

SEQ ID NO: 1048 - RNA, 17 nt, Hepatitis B virus
accccucccggggccgc

SEQ ID NO: 1049 - RNA, 17 nt, Hepatitis B virus
cccggggccgcuugggg

SEQ ID NO: 1050 - RNA, 17 nt, Hepatitis B virus
ggggccgcuuggggcuc

SEQ ID NO: 1051 - RNA, 17 nt, Hepatitis B virus
cuuggggcucuaccgcc

SEQ ID NO: 1052 - RNA, 17 nt, Hepatitis B virus
uggggcucuaccgcccg

SEQ ID NO: 1053 - RNA, 17 nt, Hepatitis B virus
ggcucuaccgcccgcuu

SEQ ID NO: 1054 - RNA, 17 nt, Hepatitis B virus
ucuaccgcccgcuucuc

SEQ ID NO: 1055 - RNA, 17 nt, Hepatitis B virus
cuaccgcccgcuucucc

SEQ ID NO: 1056 - RNA, 17 nt, Hepatitis B virus
ccgcccgcuucuccgcc

SEQ ID NO: 1057 - RNA, 17 nt, Hepatitis B virus
cccgcuucuccgccuau

SEQ ID NO: 1058 - RNA, 17 nt, Hepatitis B virus
cgcuucuccgccuauug

SEQ ID NO: 1059 - RNA, 17 nt, Hepatitis B virus
uucuccgccuauuguac

SEQ ID NO: 1060 - RNA, 17 nt, Hepatitis B virus
ucuccgccuauuguacc

SEQ ID NO: 1061 - RNA, 17 nt, Hepatitis B virus
uauuguaccgaccgucc

SEQ ID NO: 1062 - RNA, 17 nt, Hepatitis B virus
guaccgaccguccacgg

SEQ ID NO: 1063 - RNA, 17 nt, Hepatitis B virus
cgaccguccacggggcg

SEQ ID NO: 1064 - RNA, 17 nt, Hepatitis B virus
gaccguccacggggcgc

SEQ ID NO: 1065 - RNA, 17 nt, Hepatitis B virus
cggggcgcaccucucuu

SEQ ID NO: 1066 - RNA, 17 nt, Hepatitis B virus
gggcgcaccucucuuua

SEQ ID NO: 1067 - RNA, 17 nt, Hepatitis B virus
ggcgcaccucucuuuac

SEQ ID NO: 1068 - RNA, 17 nt, Hepatitis B virus
cgcaccucucuuuacgc

SEQ ID NO: 1069 - RNA, 17 nt, Hepatitis B virus
caccucucuuuacgcgg

SEQ ID NO: 1070 - RNA, 17 nt, Hepatitis B virus
acgcggacuccccgucu

SEQ ID NO: 1071 - RNA, 17 nt, Hepatitis B virus
gcggacuccccgucugu

SEQ ID NO: 1072 - RNA, 17 nt, Hepatitis B virus
cggacuccccgucugug

SEQ ID NO: 1073 - RNA, 17 nt, Hepatitis B virus
ggacuccccgucugugc

SEQ ID NO: 1074 - RNA, 17 nt, Hepatitis B virus
uccccgucugugccuuc

SEQ ID NO: 1075 - RNA, 17 nt, Hepatitis B virus
gucugugccuucucauc

SEQ ID NO: 1076 - RNA, 17 nt, Hepatitis B virus
ucugugccuucucaucu

SEQ ID NO: 1077 - RNA, 17 nt, Hepatitis B virus
gugccuucucaucugcc

SEQ ID NO: 1078 - RNA, 17 nt, Hepatitis B virus
gccuucucaucugccgg

SEQ ID NO: 1079 - RNA, 17 nt, Hepatitis B virus
uucucaucugccggacc

SEQ ID NO: 1080 - RNA, 17 nt, Hepatitis B virus
ucaucugccggaccgug

SEQ ID NO: 1081 - RNA, 17 nt, Hepatitis B virus
ugccggaccgugugcac

SEQ ID NO: 1082 - RNA, 17 nt, Hepatitis B virus
ccgugugcacuucgcuu

SEQ ID NO: 1083 - RNA, 17 nt, Hepatitis B virus
gugugcacuucgcuuca

SEQ ID NO: 1084 - RNA, 17 nt, Hepatitis B virus
cacuucgcuucaccucu

SEQ ID NO: 1085 - RNA, 17 nt, Hepatitis B virus
uucgcuucaccucugca

SEQ ID NO: 1086 - RNA, 17 nt, Hepatitis B virus
cgcuucaccucugcacg

SEQ ID NO: 1087 - RNA, 17 nt, Hepatitis B virus
gcuucaccucugcacgu

SEQ ID NO: 1088 - RNA, 17 nt, Hepatitis B virus
uucaccucugcacgucg

SEQ ID NO: 1089 - RNA, 17 nt, Hepatitis B virus
accucugcacgucgcau

SEQ ID NO: 1090 - RNA, 17 nt, Hepatitis B virus
cacgucgcauggagacc

SEQ ID NO: 1091 - RNA, 17 nt, Hepatitis B virus
auggagaccaccgugaa

SEQ ID NO: 1092 - RNA, 17 nt, Hepatitis B virus
uggagaccaccgugaac

SEQ ID NO: 1093 - RNA, 17 nt, Hepatitis B virus
gagaccaccgugaacgc

SEQ ID NO: 1094 - RNA, 17 nt, Hepatitis B virus
gugaacgcccacaggaa

SEQ ID NO: 1095 - RNA, 17 nt, Hepatitis B virus
ugaacgcccacaggaac

SEQ ID NO: 1096 - RNA, 17 nt, Hepatitis B virus
gaacgcccacaggaacc

SEQ ID NO: 1097 - RNA, 17 nt, Hepatitis B virus
acgcccacaggaaccug

SEQ ID NO: 1098 - RNA, 17 nt, Hepatitis B virus
acaggaaccugcccaag

SEQ ID NO: 1099 - RNA, 17 nt, Hepatitis B virus
caggaaccugcccaagg

SEQ ID NO: 1100 - RNA, 17 nt, Hepatitis B virus
gaaccugcccaaggucu

SEQ ID NO: 1101 - RNA, 17 nt, Hepatitis B virus
aaccugcccaaggucuu

SEQ ID NO: 1102 - RNA, 17 nt, Hepatitis B virus
accugcccaaggucuug

SEQ ID NO: 1103 - RNA, 17 nt, Hepatitis B virus
ccaaggucuugcauaag

SEQ ID NO: 1104 - RNA, 17 nt, Hepatitis B virus
ggucuugcauaagagga

SEQ ID NO: 1105 - RNA, 17 nt, Hepatitis B virus
aagaggacucuuggacu

SEQ ID NO: 1106 - RNA, 17 nt, Hepatitis B virus
gaggacucuuggacuuu

SEQ ID NO: 1107 - RNA, 17 nt, Hepatitis B virus
ucuuggacuuucagcaa

SEQ ID NO: 1108 - RNA, 17 nt, Hepatitis B virus
ggacuuucagcaauguc

SEQ ID NO: 1109 - RNA, 17 nt, Hepatitis B virus
cuuucagcaaugucaac

SEQ ID NO: 1110 - RNA, 17 nt, Hepatitis B virus
gcaaugucaacgaccga

SEQ ID NO: 1111 - RNA, 17 nt, Hepatitis B virus
ucaacgaccgaccuuga

SEQ ID NO: 1112 - RNA, 17 nt, Hepatitis B virus
cgaccgaccuugaggca

SEQ ID NO: 1113 - RNA, 17 nt, Hepatitis B virus
gaccgaccuugaggcau

SEQ ID NO: 1114 - RNA, 17 nt, Hepatitis B virus
cuugaggcauacuucaa

SEQ ID NO: 1115 - RNA, 17 nt, Hepatitis B virus
aggcauacuucaaagac

SEQ ID NO: 1116 - RNA, 17 nt, Hepatitis B virus
cauacuucaaagacugu

SEQ ID NO: 1117 - RNA, 17 nt, Hepatitis B virus
ucaaagacuguguguuu

SEQ ID NO: 1118 - RNA, 17 nt, Hepatitis B virus
uaaaggucuuuguacua

SEQ ID NO: 1119 - RNA, 17 nt, Hepatitis B virus
cuuuguacuaggaggcu

SEQ ID NO: 1120 - RNA, 17 nt, Hepatitis B virus
uaggaggcuguaggcau

SEQ ID NO: 1121 - RNA, 17 nt, Hepatitis B virus
cuguaggcauaaauugg

SEQ ID NO: 1122 - RNA, 17 nt, Hepatitis B virus
guguguucaccagcacc

SEQ ID NO: 1123 - RNA, 17 nt, Hepatitis B virus
guguucaccagcaccau

SEQ ID NO: 1124 - RNA, 17 nt, Hepatitis B virus
uguucaccagcaccaug

SEQ ID NO: 1125 - RNA, 17 nt, Hepatitis B virus
ucaccagcaccaugcaa

SEQ ID NO: 1126 - RNA, 17 nt, Hepatitis B virus
accagcaccaugcaacu

SEQ ID NO: 1127 - RNA, 17 nt, Hepatitis B virus
ccagcaccaugcaacuu

SEQ ID NO: 1128 - RNA, 17 nt, Hepatitis B virus
caccaugcaacuuuuuc

SEQ ID NO: 1129 - RNA, 17 nt, Hepatitis B virus
caugcaacuuuuucacc

SEQ ID NO: 1130 - RNA, 17 nt, Hepatitis B virus
acuuuuucaccucugcc

SEQ ID NO: 1131 - RNA, 17 nt, Hepatitis B virus
uuuuucaccucugccua

SEQ ID NO: 1132 - RNA, 17 nt, Hepatitis B virus
uuuucaccucugccuaa

SEQ ID NO: 1133 - RNA, 17 nt, Hepatitis B virus
uucaccucugccuaauc

SEQ ID NO: 1134 - RNA, 17 nt, Hepatitis B virus
accucugccuaaucauc

SEQ ID NO: 1135 - RNA, 17 nt, Hepatitis B virus
ccucugccuaaucaucu

SEQ ID NO: 1136 - RNA, 17 nt, Hepatitis B virus
gccuaaucaucucaugu

SEQ ID NO: 1137 - RNA, 17 nt, Hepatitis B virus
uaaucaucucauguuca

SEQ ID NO: 1138 - RNA, 17 nt, Hepatitis B virus
aucaucucauguucaug

SEQ ID NO: 1139 - RNA, 17 nt, Hepatitis B virus
ucauguucauguccuac

SEQ ID NO: 1140 - RNA, 17 nt, Hepatitis B virus
uucauguccuacuguuc

SEQ ID NO: 1141 - RNA, 17 nt, Hepatitis B virus
ucauguccuacuguuca

SEQ ID NO: 1142 - RNA, 17 nt, Hepatitis B virus
uguccuacuguucaagc

SEQ ID NO: 1143 - RNA, 17 nt, Hepatitis B virus
uacuguucaagccucca

SEQ ID NO: 1144 - RNA, 17 nt, Hepatitis B virus
guucaagccuccaagcu

SEQ ID NO: 1145 - RNA, 17 nt, Hepatitis B virus
uucaagccuccaagcug

SEQ ID NO: 1146 - RNA, 17 nt, Hepatitis B virus
caagccuccaagcugug

SEQ ID NO: 1147 - RNA, 17 nt, Hepatitis B virus
aagccuccaagcugugc

SEQ ID NO: 1148 - RNA, 17 nt, Hepatitis B virus
cuccaagcugugccuug

SEQ ID NO: 1149 - RNA, 17 nt, Hepatitis B virus
agcugugccuugggugg

SEQ ID NO: 1150 - RNA, 17 nt, Hepatitis B virus
gcugugccuuggguggc

SEQ ID NO: 1151 - RNA, 17 nt, Hepatitis B virus
uggguggcuuuggggca

SEQ ID NO: 1152 - RNA, 17 nt, Hepatitis B virus
uuuggggcauggacauu

SEQ ID NO: 1153 - RNA, 17 nt, Hepatitis B virus
gcauggacauugacccg

SEQ ID NO: 1154 - RNA, 17 nt, Hepatitis B virus
acauugacccguauaaa

SEQ ID NO: 1155 - RNA, 17 nt, Hepatitis B virus
cauugacccguauaaag

SEQ ID NO: 1156 - RNA, 17 nt, Hepatitis B virus
uuuggagcuucugugga

SEQ ID NO: 1157 - RNA, 17 nt, Hepatitis B virus
ggagcuucuguggaguu

SEQ ID NO: 1158 - RNA, 17 nt, Hepatitis B virus
ggaguuacucucuuuuu

SEQ ID NO: 1159 - RNA, 17 nt, Hepatitis B virus
aguuacucucuuuuuug

SEQ ID NO: 1160 - RNA, 17 nt, Hepatitis B virus
uuacucucuuuuuugcc

SEQ ID NO: 1161 - RNA, 17 nt, Hepatitis B virus
uuuuuugccuucugacu

SEQ ID NO: 1162 - RNA, 17 nt, Hepatitis B virus
uuuuugccuucugacuu

SEQ ID NO: 1163 - RNA, 17 nt, Hepatitis B virus
uugccuucugacuucuu

SEQ ID NO: 1164 - RNA, 17 nt, Hepatitis B virus
cuucugacuucuuuccu

SEQ ID NO: 1165 - RNA, 17 nt, Hepatitis B virus
cugacuucuuuccuucu

SEQ ID NO: 1166 - RNA, 17 nt, Hepatitis B virus
cuucuuuccuucuauuc

SEQ ID NO: 1167 - RNA, 17 nt, Hepatitis B virus
uucuuuccuucuauucg

SEQ ID NO: 1168 - RNA, 17 nt, Hepatitis B virus
uuuccuucuauucgaga

SEQ ID NO: 1169 - RNA, 17 nt, Hepatitis B virus
ucgagaucuccucgaca

SEQ ID NO: 1170 - RNA, 17 nt, Hepatitis B virus
gagaucuccucgacacc

SEQ ID NO: 1171 - RNA, 17 nt, Hepatitis B virus
agaucuccucgacaccg

SEQ ID NO: 1172 - RNA, 17 nt, Hepatitis B virus
uccucgacaccgccucu

SEQ ID NO: 1173 - RNA, 17 nt, Hepatitis B virus
cucgacaccgccucugc

SEQ ID NO: 1174 - RNA, 17 nt, Hepatitis B virus
gacaccgccucugcucu

SEQ ID NO: 1175 - RNA, 17 nt, Hepatitis B virus
acaccgccucugcucug

SEQ ID NO: 1176 - RNA, 17 nt, Hepatitis B virus
accgccucugcucugua

SEQ ID NO: 1177 - RNA, 17 nt, Hepatitis B virus
gccucugcucuguaucg

SEQ ID NO: 1178 - RNA, 17 nt, Hepatitis B virus
cucugcucuguaucggg

SEQ ID NO: 1179 - RNA, 17 nt, Hepatitis B virus
cggggggccuuagaguc

SEQ ID NO: 1180 - RNA, 17 nt, Hepatitis B virus
ggggggccuuagagucu

SEQ ID NO: 1181 - RNA, 17 nt, Hepatitis B virus
uuagagucuccggaaca

SEQ ID NO: 1182 - RNA, 17 nt, Hepatitis B virus
agagucuccggaacauu

SEQ ID NO: 1183 - RNA, 17 nt, Hepatitis B virus
uccggaacauuguucac

SEQ ID NO: 1184 - RNA, 17 nt, Hepatitis B virus
cauuguucaccucacca

SEQ ID NO: 1185 - RNA, 17 nt, Hepatitis B virus
uuguucaccucaccaua

SEQ ID NO: 1186 - RNA, 17 nt, Hepatitis B virus
uguucaccucaccauac

SEQ ID NO: 1187 - RNA, 17 nt, Hepatitis B virus
uucaccucaccauacgg

SEQ ID NO: 1188 - RNA, 17 nt, Hepatitis B virus
caccucaccauacggca

SEQ ID NO: 1189 - RNA, 17 nt, Hepatitis B virus
accucaccauacggcac

SEQ ID NO: 1190 - RNA, 17 nt, Hepatitis B virus
cauacggcacucaggca

SEQ ID NO: 1191 - RNA, 17 nt, Hepatitis B virus
uacggcacucaggcaag

SEQ ID NO: 1192 - RNA, 17 nt, Hepatitis B virus
cggcacucaggcaagcu

SEQ ID NO: 1193 - RNA, 17 nt, Hepatitis B virus
acucaggcaagcuauuc

SEQ ID NO: 1194 - RNA, 17 nt, Hepatitis B virus
aggcaagcuauucugug

SEQ ID NO: 1195 - RNA, 17 nt, Hepatitis B virus
agcuauucuguguuggg

SEQ ID NO: 1196 - RNA, 17 nt, Hepatitis B virus
gaugaaucuagccaccu

SEQ ID NO: 1197 - RNA, 17 nt, Hepatitis B virus
aaucuagccaccugggu

SEQ ID NO: 1198 - RNA, 17 nt, Hepatitis B virus
aucuagccaccugggug

SEQ ID NO: 1199 - RNA, 17 nt, Hepatitis B virus
cuagccaccuggguggg

SEQ ID NO: 1200 - RNA, 17 nt, Hepatitis B virus
uagccaccuggguggga

SEQ ID NO: 1201 - RNA, 17 nt, Hepatitis B virus
ggaagauccagcaucca

SEQ ID NO: 1202 - RNA, 17 nt, Hepatitis B virus
gaagauccagcauccag

SEQ ID NO: 1203 - RNA, 17 nt, Hepatitis B virus
gauccagcauccaggga

SEQ ID NO: 1204 - RNA, 17 nt, Hepatitis B virus
ccagcauccagggaauu

SEQ ID NO: 1205 - RNA, 17 nt, Hepatitis B virus
cagcauccagggaauua

SEQ ID NO: 1206 - RNA, 17 nt, Hepatitis B virus
uaguagucagcuauguc

SEQ ID NO: 1207 - RNA, 17 nt, Hepatitis B virus
uagucagcuaugucaac

SEQ ID NO: 1208 - RNA, 17 nt, Hepatitis B virus
gcuaugucaacguuaau

SEQ ID NO: 1209 - RNA, 17 nt, Hepatitis B virus
auaugggccuaaaaauc

SEQ ID NO: 1210 - RNA, 17 nt, Hepatitis B virus
uaugggccuaaaaauca

SEQ ID NO: 1211 - RNA, 17 nt, Hepatitis B virus
uaaaaaucagacaacua

SEQ ID NO: 1212 - RNA, 17 nt, Hepatitis B virus
aaucagacaacuauugu

SEQ ID NO: 1213 - RNA, 17 nt, Hepatitis B virus
cagacaacuauuguggu

SEQ ID NO: 1214 - RNA, 17 nt, Hepatitis B virus
gugguuucacauuuccu

SEQ ID NO: 1215 - RNA, 17 nt, Hepatitis B virus
gguuucacauuuccugu

SEQ ID NO: 1216 - RNA, 17 nt, Hepatitis B virus
cacauuuccugucuuac

SEQ ID NO: 1217 - RNA, 17 nt, Hepatitis B virus
acauuuccugucuuacu

SEQ ID NO: 1218 - RNA, 17 nt, Hepatitis B virus
uuccugucuuacuuuug

SEQ ID NO: 1219 - RNA, 17 nt, Hepatitis B virus
ugucuuacuuuugggcg

SEQ ID NO: 1220 - RNA, 17 nt, Hepatitis B virus
cgagaaacuguucuuga

SEQ ID NO: 1221 - RNA, 17 nt, Hepatitis B virus
aacuguucuugaauauu

SEQ ID NO: 1222 - RNA, 17 nt, Hepatitis B virus
uuggugucuuuuggagu

SEQ ID NO: 1223 - RNA, 17 nt, Hepatitis B virus
ggauucgcacuccuccu

SEQ ID NO: 1224 - RNA, 17 nt, Hepatitis B virus
auucgcacuccuccugc

SEQ ID NO: 1225 - RNA, 17 nt, Hepatitis B virus
ucgcacuccuccugcau

SEQ ID NO: 1226 - RNA, 17 nt, Hepatitis B virus
cgcacuccuccugcaua

SEQ ID NO: 1227 - RNA, 17 nt, Hepatitis B virus
cacuccuccugcauaua

SEQ ID NO: 1228 - RNA, 17 nt, Hepatitis B virus
acuccuccugcauauag

SEQ ID NO: 1229 - RNA, 17 nt, Hepatitis B virus
ccuccugcauauagacc

SEQ ID NO: 1230 - RNA, 17 nt, Hepatitis B virus
auauagaccaccaaaug

SEQ ID NO: 1231 - RNA, 17 nt, Hepatitis B virus
uauagaccaccaaaugc

SEQ ID NO: 1232 - RNA, 17 nt, Hepatitis B virus
uagaccaccaaaugccc

SEQ ID NO: 1233 - RNA, 17 nt, Hepatitis B virus
agaccaccaaaugcccc

SEQ ID NO: 1234 - RNA, 17 nt, Hepatitis B virus
ccaaaugccccuaucuu

SEQ ID NO: 1235 - RNA, 17 nt, Hepatitis B virus
caaaugccccuaucuua

SEQ ID NO: 1236 - RNA, 17 nt, Hepatitis B virus
aaaugccccuaucuuau

SEQ ID NO: 1237 - RNA, 17 nt, Hepatitis B virus
aaugccccuaucuuauc

SEQ ID NO: 1238 - RNA, 17 nt, Hepatitis B virus
ccccuaucuuaucaaca

SEQ ID NO: 1239 - RNA, 17 nt, Hepatitis B virus
aucuuaucaacacuucc

SEQ ID NO: 1240 - RNA, 17 nt, Hepatitis B virus
uuaucaacacuuccgga

SEQ ID NO: 1241 - RNA, 17 nt, Hepatitis B virus
aucaacacuuccggaaa

SEQ ID NO: 1242 - RNA, 17 nt, Hepatitis B virus
aacacuuccggaaacua

SEQ ID NO: 1243 - RNA, 17 nt, Hepatitis B virus
ccggaaacuacuguugu

SEQ ID NO: 1244 - RNA, 17 nt, Hepatitis B virus
gaaacuacuguuguuag

SEQ ID NO: 1245 - RNA, 17 nt, Hepatitis B virus
gaagaggcagguccccu

SEQ ID NO: 1246 - RNA, 17 nt, Hepatitis B virus
ggcagguccccuagaag

SEQ ID NO: 1247 - RNA, 17 nt, Hepatitis B virus
gcagguccccuagaaga

SEQ ID NO: 1248 - RNA, 17 nt, Hepatitis B virus
cagguccccuagaagaa

SEQ ID NO: 1249 - RNA, 17 nt, Hepatitis B virus
agguccccuagaagaag

SEQ ID NO: 1250 - RNA, 17 nt, Hepatitis B virus
agaagaacucccucgcc

SEQ ID NO: 1251 - RNA, 17 nt, Hepatitis B virus
aagaacucccucgccuc

SEQ ID NO: 1252 - RNA, 17 nt, Hepatitis B virus
agaacucccucgccucg

SEQ ID NO: 1253 - RNA, 17 nt, Hepatitis B virus
gaacucccucgccucgc

SEQ ID NO: 1254 - RNA, 17 nt, Hepatitis B virus
ucccucgccucgcagac

SEQ ID NO: 1255 - RNA, 17 nt, Hepatitis B virus
cccucgccucgcagacg

SEQ ID NO: 1256 - RNA, 17 nt, Hepatitis B virus
cgccucgcagacgaagg

SEQ ID NO: 1257 - RNA, 17 nt, Hepatitis B virus
cgaaggucucaaucgcc

SEQ ID NO: 1258 - RNA, 17 nt, Hepatitis B virus
aaggucucaaucgccgc

SEQ ID NO: 1259 - RNA, 17 nt, Hepatitis B virus
ucaaucgccgcgucgca

SEQ ID NO: 1260 - RNA, 17 nt, Hepatitis B virus
cgcgucgcagaagaucu

SEQ ID NO: 1261 - RNA, 17 nt, Hepatitis B virus
agaagaucucaaucucg

SEQ ID NO: 1262 - RNA, 17 nt, Hepatitis B virus
aagaucucaaucucggg

SEQ ID NO: 1263 - RNA, 17 nt, Hepatitis B virus
ucucaaucucgggaauc

SEQ ID NO: 1264 - RNA, 17 nt, Hepatitis B virus
cgggaaucucaauguua

SEQ ID NO: 1265 - RNA, 17 nt, Hepatitis B virus
ggaaucucaauguuagu

SEQ ID NO: 1266 - RNA, 17 nt, Hepatitis B virus
uaguauuccuuggacac

SEQ ID NO: 1267 - RNA, 17 nt, Hepatitis B virus
aguauuccuuggacaca

SEQ ID NO: 1268 - RNA, 17 nt, Hepatitis B virus
ccuuggacacauaaggu

SEQ ID NO: 1269 - RNA, 17 nt, Hepatitis B virus
uuggacacauaaggugg

SEQ ID NO: 1270 - RNA, 17 nt, Hepatitis B virus
ugggaaacuuuacgggg

SEQ ID NO: 1271 - RNA, 17 nt, Hepatitis B virus
uacggggcuuuauucuu

SEQ ID NO: 1272 - RNA, 17 nt, Hepatitis B virus
cuuuauucuucuacggu

SEQ ID NO: 1273 - RNA, 17 nt, Hepatitis B virus
uauucuucuacgguacc

SEQ ID NO: 1274 - RNA, 17 nt, Hepatitis B virus
uacgguaccuugcuuua

SEQ ID NO: 1275 - RNA, 17 nt, Hepatitis B virus
acgguaccuugcuuuaa

SEQ ID NO: 1276 - RNA, 17 nt, Hepatitis B virus
uaccuugcuuuaauccu

SEQ ID NO: 1277 - RNA, 17 nt, Hepatitis B virus
cuuuaauccuaaauggc

SEQ ID NO: 1278 - RNA, 17 nt, Hepatitis B virus
uuuaauccuaaauggca

SEQ ID NO: 1279 - RNA, 17 nt, Hepatitis B virus
uaaauggcaaacuccuu

SEQ ID NO: 1280 - RNA, 17 nt, Hepatitis B virus
uggcaaacuccuucuuu

SEQ ID NO: 1281 - RNA, 17 nt, Hepatitis B virus
gcaaacuccuucuuuuc

SEQ ID NO: 1282 - RNA, 17 nt, Hepatitis B virus
caaacuccuucuuuucc

SEQ ID NO: 1283 - RNA, 17 nt, Hepatitis B virus
acuccuucuuuuccuga

SEQ ID NO: 1284 - RNA, 17 nt, Hepatitis B virus
uucuuuuccugacauuc

SEQ ID NO: 1285 - RNA, 17 nt, Hepatitis B virus
ucuuuuccugacauuca

SEQ ID NO: 1286 - RNA, 17 nt, Hepatitis B virus
uuccugacauucauuug

SEQ ID NO: 1287 - RNA, 17 nt, Hepatitis B virus
ugacauucauuugcagg

SEQ ID NO: 1288 - RNA, 17 nt, Hepatitis B virus
ucauuugcaggaggaca

SEQ ID NO: 1289 - RNA, 17 nt, Hepatitis B virus
aggaggacauuguugau

SEQ ID NO: 1290 - RNA, 17 nt, Hepatitis B virus
auguaagcaauuugugg

SEQ ID NO: 1291 - RNA, 17 nt, Hepatitis B virus
uguggggccccuuacag

SEQ ID NO: 1292 - RNA, 17 nt, Hepatitis B virus
guggggccccuuacagu

SEQ ID NO: 1293 - RNA, 17 nt, Hepatitis B virus
uggggccccuuacagua

SEQ ID NO: 1294 - RNA, 17 nt, Hepatitis B virus
ggggccccuuacaguaa

SEQ ID NO: 1295 - RNA, 17 nt, Hepatitis B virus
ccccuuacaguaaauga

SEQ ID NO: 1296 - RNA, 17 nt, Hepatitis B virus
augaaaacaggagacuu

SEQ ID NO: 1297 - RNA, 17 nt, Hepatitis B virus
caggagacuuaaauuaa

SEQ ID NO: 1298 - RNA, 17 nt, Hepatitis B virus
aaauuaacuaugccugc

SEQ ID NO: 1299 - RNA, 17 nt, Hepatitis B virus
aacuaugccugcuaggu

SEQ ID NO: 1300 - RNA, 17 nt, Hepatitis B virus
acuaugccugcuagguu

SEQ ID NO: 1301 - RNA, 17 nt, Hepatitis B virus
augccugcuagguuuua

SEQ ID NO: 1302 - RNA, 17 nt, Hepatitis B virus
guuuuaucccaauguua

SEQ ID NO: 1303 - RNA, 17 nt, Hepatitis B virus
uuuuaucccaauguuac

SEQ ID NO: 1304 - RNA, 17 nt, Hepatitis B virus
uuuaucccaauguuacu

SEQ ID NO: 1305 - RNA, 17 nt, Hepatitis B virus
aauguuacuaaauauuu

SEQ ID NO: 1306 - RNA, 17 nt, Hepatitis B virus
auauuugcccuuagaua

SEQ ID NO: 1307 - RNA, 17 nt, Hepatitis B virus
uauuugcccuuagauaa

SEQ ID NO: 1308 - RNA, 17 nt, Hepatitis B virus
auuugcccuuagauaaa

SEQ ID NO: 1309 - RNA, 17 nt, Hepatitis B virus
aagggaucaaaccguau

SEQ ID NO: 1310 - RNA, 17 nt, Hepatitis B virus
gaucaaaccguauuauc

SEQ ID NO: 1311 - RNA, 17 nt, Hepatitis B virus
guauuauccagaguaug

SEQ ID NO: 1312 - RNA, 17 nt, Hepatitis B virus
uauuauccagaguaugu

SEQ ID NO: 1313 - RNA, 17 nt, Hepatitis B virus
aguuaaucauuacuucc

SEQ ID NO: 1314 - RNA, 17 nt, Hepatitis B virus
aucauuacuuccagacg

SEQ ID NO: 1315 - RNA, 17 nt, Hepatitis B virus
auuacuuccagacgcga

SEQ ID NO: 1316 - RNA, 17 nt, Hepatitis B virus
uuacuuccagacgcgac

SEQ ID NO: 1317 - RNA, 17 nt, Hepatitis B virus
gacgcgacauuauuuac

SEQ ID NO: 1318 - RNA, 17 nt, Hepatitis B virus
uuauuuacacacucuuu

SEQ ID NO: 1319 - RNA, 17 nt, Hepatitis B virus
auuuacacacucuuugg

SEQ ID NO: 1320 - RNA, 17 nt, Hepatitis B virus
uuacacacucuuuggaa

SEQ ID NO: 1321 - RNA, 17 nt, Hepatitis B virus
acacacucuuuggaagg

SEQ ID NO: 1322 - RNA, 17 nt, Hepatitis B virus
cggggaucuuauauaaa

SEQ ID NO: 1323 - RNA, 17 nt, Hepatitis B virus
agagaguccacacguag

SEQ ID NO: 1324 - RNA, 17 nt, Hepatitis B virus
gagaguccacacguagc

SEQ ID NO: 1325 - RNA, 17 nt, Hepatitis B virus
gaguccacacguagcgc

SEQ ID NO: 1326 - RNA, 17 nt, Hepatitis B virus
cguagcgccucauuuug

SEQ ID NO: 1327 - RNA, 17 nt, Hepatitis B virus
guagcgccucauuuugc

SEQ ID NO: 1328 - RNA, 17 nt, Hepatitis B virus
agcgccucauuuugcgg

SEQ ID NO: 1329 - RNA, 17 nt, Hepatitis B virus
ugcgggucaccauauuc

SEQ ID NO: 1330 - RNA, 17 nt, Hepatitis B virus
cgggucaccauauucuu

SEQ ID NO: 1331 - RNA, 17 nt, Hepatitis B virus
gggucaccauauucuug

SEQ ID NO: 1332 - RNA, 17 nt, Hepatitis B virus
ccauauucuugggaaca

SEQ ID NO: 1333 - RNA, 17 nt, Hepatitis B virus
uugggaacaagaucuac

SEQ ID NO: 1334 - RNA, 17 nt, Hepatitis B virus
acaagaucuacagcaug

SEQ ID NO: 1335 - RNA, 17 nt, Hepatitis B virus
agaucuacagcauggga

SEQ ID NO: 1336 - RNA, 17 nt, Hepatitis B virus
ucuacagcaugggaggu

SEQ ID NO: 1337 - RNA, 17 nt, Hepatitis B virus
gguuggucuuccaaacc

SEQ ID NO: 1338 - RNA, 17 nt, Hepatitis B virus
uggucuuccaaaccucg

SEQ ID NO: 1339 - RNA, 17 nt, Hepatitis B virus
ggucuuccaaaccucga

SEQ ID NO: 1340 - RNA, 17 nt, Hepatitis B virus
uuccaaaccucgaaaag

SEQ ID NO: 1341 - RNA, 17 nt, Hepatitis B virus
uccaaaccucgaaaagg

SEQ ID NO: 1342 - RNA, 17 nt, Hepatitis B virus
gaaaaggcauggggaca

SEQ ID NO: 1343 - RNA, 17 nt, Hepatitis B virus
auggggacaaaucuuuc

SEQ ID NO: 1344 - RNA, 17 nt, Hepatitis B virus
gacaaaucuuucugucc

SEQ ID NO: 1345 - RNA, 17 nt, Hepatitis B virus
aaucuuucuguccccaa

SEQ ID NO: 1346 - RNA, 17 nt, Hepatitis B virus
uuucuguccccaauccc

SEQ ID NO: 1347 - RNA, 17 nt, Hepatitis B virus
uucuguccccaaucccc

SEQ ID NO: 1348 - RNA, 17 nt, Hepatitis B virus
ucuguccccaauccccu

SEQ ID NO: 1349 - RNA, 17 nt, Hepatitis B virus
cuguccccaauccccug

SEQ ID NO: 1350 - RNA, 17 nt, Hepatitis B virus
ccccaauccccugggau

SEQ ID NO: 1351 - RNA, 17 nt, Hepatitis B virus
cccaauccccugggauu

SEQ ID NO: 1352 - RNA, 17 nt, Hepatitis B virus
ccaauccccugggauuc

SEQ ID NO: 1353 - RNA, 17 nt, Hepatitis B virus
caauccccugggauucu

SEQ ID NO: 1354 - RNA, 17 nt, Hepatitis B virus
ugggauucuuccccgau

SEQ ID NO: 1355 - RNA, 17 nt, Hepatitis B virus
gauucuuccccgaucau

SEQ ID NO: 1356 - RNA, 17 nt, Hepatitis B virus
auucuuccccgaucauc

SEQ ID NO: 1357 - RNA, 17 nt, Hepatitis B virus
uucuuccccgaucauca

SEQ ID NO: 1358 - RNA, 17 nt, Hepatitis B virus
ccccgaucaucaguugg

SEQ ID NO: 1359 - RNA, 17 nt, Hepatitis B virus
cgaucaucaguuggacc

SEQ ID NO: 1360 - RNA, 17 nt, Hepatitis B virus
aguuggacccugcauuc

SEQ ID NO: 1361 - RNA, 17 nt, Hepatitis B virus
guuggacccugcauuca

SEQ ID NO: 1362 - RNA, 17 nt, Hepatitis B virus
uuggacccugcauucaa

SEQ ID NO: 1363 - RNA, 17 nt, Hepatitis B virus
gacccugcauucaaagc

SEQ ID NO: 1364 - RNA, 17 nt, Hepatitis B virus
cugcauucaaagccaac

SEQ ID NO: 1365 - RNA, 17 nt, Hepatitis B virus
uucaaagccaacucagu

SEQ ID NO: 1366 - RNA, 17 nt, Hepatitis B virus
ucaaagccaacucagua

SEQ ID NO: 1367 - RNA, 17 nt, Hepatitis B virus
aagccaacucaguaaau

SEQ ID NO: 1368 - RNA, 17 nt, Hepatitis B virus
gccaacucaguaaaucc

SEQ ID NO: 1369 - RNA, 17 nt, Hepatitis B virus
aguaaauccagauuggg

SEQ ID NO: 1370 - RNA, 17 nt, Hepatitis B virus
guaaauccagauuggga

SEQ ID NO: 1371 - RNA, 17 nt, Hepatitis B virus
auugggaccucaacccg

SEQ ID NO: 1372 - RNA, 17 nt, Hepatitis B virus
uugggaccucaacccgc

SEQ ID NO: 1373 - RNA, 17 nt, Hepatitis B virus
gggaccucaacccgcac

SEQ ID NO: 1374 - RNA, 17 nt, Hepatitis B virus
accucaacccgcacaag

SEQ ID NO: 1375 - RNA, 17 nt, Hepatitis B virus
ccucaacccgcacaagg

SEQ ID NO: 1376 - RNA, 17 nt, Hepatitis B virus
caacccgcacaaggaca

SEQ ID NO: 1377 - RNA, 17 nt, Hepatitis B virus
acccgcacaaggacaac

SEQ ID NO: 1378 - RNA, 17 nt, Hepatitis B virus
acaaggacaacuggccg

SEQ ID NO: 1379 - RNA, 17 nt, Hepatitis B virus
aggacaacuggccggac

SEQ ID NO: 1380 - RNA, 17 nt, Hepatitis B virus
caacuggccggacgcca

SEQ ID NO: 1381 - RNA, 17 nt, Hepatitis B virus
ccggacgccaacaaggu

SEQ ID NO: 1382 - RNA, 17 nt, Hepatitis B virus
cggacgccaacaaggug

SEQ ID NO: 1383 - RNA, 17 nt, Hepatitis B virus
acgccaacaagguggga

SEQ ID NO: 1384 - RNA, 17 nt, Hepatitis B virus
gugggagcauucgggcc

SEQ ID NO: 1385 - RNA, 17 nt, Hepatitis B virus
auucgggccaggguuca

SEQ ID NO: 1386 - RNA, 17 nt, Hepatitis B virus
uucgggccaggguucac

SEQ ID NO: 1387 - RNA, 17 nt, Hepatitis B virus
caggguucaccccuccc

SEQ ID NO: 1388 - RNA, 17 nt, Hepatitis B virus
ggguucaccccucccca

SEQ ID NO: 1389 - RNA, 17 nt, Hepatitis B virus
gguucaccccuccccau

SEQ ID NO: 1390 - RNA, 17 nt, Hepatitis B virus
guucaccccuccccaug

SEQ ID NO: 1391 - RNA, 17 nt, Hepatitis B virus
uucaccccuccccaugg

SEQ ID NO: 1392 - RNA, 17 nt, Hepatitis B virus
caccccuccccaugggg

SEQ ID NO: 1393 - RNA, 17 nt, Hepatitis B virus
accccuccccauggggg

SEQ ID NO: 1394 - RNA, 17 nt, Hepatitis B virus
ccccuccccauggggga

SEQ ID NO: 1395 - RNA, 17 nt, Hepatitis B virus
cccuccccaugggggac

SEQ ID NO: 1396 - RNA, 17 nt, Hepatitis B virus
ugggggacuguuggggu

SEQ ID NO: 1397 - RNA, 17 nt, Hepatitis B virus
gguggagcccucacgcu

SEQ ID NO: 1398 - RNA, 17 nt, Hepatitis B virus
guggagcccucacgcuc

SEQ ID NO: 1399 - RNA, 17 nt, Hepatitis B virus
uggagcccucacgcuca

SEQ ID NO: 1400 - RNA, 17 nt, Hepatitis B virus
gagcccucacgcucagg

SEQ ID NO: 1401 - RNA, 17 nt, Hepatitis B virus
ccucacgcucagggccu

SEQ ID NO: 1402 - RNA, 17 nt, Hepatitis B virus
ucacgcucagggccuac

SEQ ID NO: 1403 - RNA, 17 nt, Hepatitis B virus
cucagggccuacucaca

SEQ ID NO: 1404 - RNA, 17 nt, Hepatitis B virus
ucagggccuacucacaa

SEQ ID NO: 1405 - RNA, 17 nt, Hepatitis B virus
gggccuacucacaacug

SEQ ID NO: 1406 - RNA, 17 nt, Hepatitis B virus
gccuacucacaacugug

SEQ ID NO: 1407 - RNA, 17 nt, Hepatitis B virus
cuacucacaacugugcc

SEQ ID NO: 1408 - RNA, 17 nt, Hepatitis B virus
cucacaacugugccagc

SEQ ID NO: 1409 - RNA, 17 nt, Hepatitis B virus
aacugugccagcagcuc

SEQ ID NO: 1410 - RNA, 17 nt, Hepatitis B virus
acugugccagcagcucc

SEQ ID NO: 1411 - RNA, 17 nt, Hepatitis B virus
gugccagcagcuccucc

SEQ ID NO: 1412 - RNA, 17 nt, Hepatitis B virus
ccagcagcuccuccucc

SEQ ID NO: 1413 - RNA, 17 nt, Hepatitis B virus
agcagcuccuccuccug

SEQ ID NO: 1414 - RNA, 17 nt, Hepatitis B virus
gcagcuccuccuccugc

SEQ ID NO: 1415 - RNA, 17 nt, Hepatitis B virus
agcuccuccuccugccu

SEQ ID NO: 1416 - RNA, 17 nt, Hepatitis B virus
gcuccuccuccugccuc

SEQ ID NO: 1417 - RNA, 17 nt, Hepatitis B virus
uccuccuccugccucca

SEQ ID NO: 1418 - RNA, 17 nt, Hepatitis B virus
ccuccuccugccuccac

SEQ ID NO: 1419 - RNA, 17 nt, Hepatitis B virus
ccuccugccuccaccaa

SEQ ID NO: 1420 - RNA, 17 nt, Hepatitis B virus
cuccugccuccaccaau

SEQ ID NO: 1421 - RNA, 17 nt, Hepatitis B virus
ccugccuccaccaaucg

SEQ ID NO: 1422 - RNA, 17 nt, Hepatitis B virus
cugccuccaccaaucgg

SEQ ID NO: 1423 - RNA, 17 nt, Hepatitis B virus
gccuccaccaaucggca

SEQ ID NO: 1424 - RNA, 17 nt, Hepatitis B virus
ccuccaccaaucggcag

SEQ ID NO: 1425 - RNA, 17 nt, Hepatitis B virus
caaucggcagucaggaa

SEQ ID NO: 1426 - RNA, 17 nt, Hepatitis B virus
cggcagucaggaaggca

SEQ ID NO: 1427 - RNA, 17 nt, Hepatitis B virus
aggaaggcagccuacuc

SEQ ID NO: 1428 - RNA, 17 nt, Hepatitis B virus
aaggcagccuacucccu

SEQ ID NO: 1429 - RNA, 17 nt, Hepatitis B virus
aggcagccuacucccuu

SEQ ID NO: 1430 - RNA, 17 nt, Hepatitis B virus
cagccuacucccuuauc

SEQ ID NO: 1431 - RNA, 17 nt, Hepatitis B virus
gccuacucccuuaucuc

SEQ ID NO: 1432 - RNA, 17 nt, Hepatitis B virus
ccuacucccuuaucucc

SEQ ID NO: 1433 - RNA, 17 nt, Hepatitis B virus
cuacucccuuaucucca

SEQ ID NO: 1434 - RNA, 17 nt, Hepatitis B virus
cccuuaucuccaccucu

SEQ ID NO: 1435 - RNA, 17 nt, Hepatitis B virus
cuuaucuccaccucuaa

SEQ ID NO: 1436 - RNA, 17 nt, Hepatitis B virus
uuaucuccaccucuaag

SEQ ID NO: 1437 - RNA, 17 nt, Hepatitis B virus
aucuccaccucuaaggg

SEQ ID NO: 1438 - RNA, 17 nt, Hepatitis B virus
ucuccaccucuaaggga

SEQ ID NO: 1439 - RNA, 17 nt, Hepatitis B virus
uccaccucuaagggaca

SEQ ID NO: 1440 - RNA, 17 nt, Hepatitis B virus
uaagggacacucauccu

SEQ ID NO: 1441 - RNA, 17 nt, Hepatitis B virus
agggacacucauccuca

SEQ ID NO: 1442 - RNA, 17 nt, Hepatitis B virus
ggacacucauccucagg

SEQ ID NO: 1443 - RNA, 17 nt, Hepatitis B virus
cacucauccucaggcca

SEQ ID NO: 1444 - RNA, 17 nt, Hepatitis B virus
acucauccucaggccau

SEQ ID NO: 1445 - RNA, 17 nt, Hepatitis B virus
ucauccucaggccaugc

SEQ ID NO: 1446 - RNA, 17 nt, Hepatitis B virus
ccucaggccaugcagug

SEQ ID NO: 1447 - RNA, 17 nt, Hepatitis B virus
cucaggccaugcagugg

SEQ ID NO: 1448 - RNA, 17 nt, Hepatitis B virus
acuuuccugcugguggc

SEQ ID NO: 1449 - RNA, 17 nt, Hepatitis B virus
ggaacagugagcccugc

SEQ ID NO: 1450 - RNA, 17 nt, Hepatitis B virus
ugagcccugcucagaau

SEQ ID NO: 1451 - RNA, 17 nt, Hepatitis B virus
cugucucugccauaucg

SEQ ID NO: 1452 - RNA, 17 nt, Hepatitis B virus
aucuuaucgaagacugg

SEQ ID NO: 1453 - RNA, 17 nt, Hepatitis B virus
ccuguaccgaacaugga

SEQ ID NO: 1454 - RNA, 17 nt, Hepatitis B virus
agaacaucgcaucagga

SEQ ID NO: 1455 - RNA, 17 nt, Hepatitis B virus
ggaccccugcucguguu

SEQ ID NO: 1456 - RNA, 17 nt, Hepatitis B virus
uucuuguugacaaaaau

SEQ ID NO: 1457 - RNA, 17 nt, Hepatitis B virus
caaaauucgcaguccca

SEQ ID NO: 1458 - RNA, 17 nt, Hepatitis B virus
ugguuaucgcuggaugu

SEQ ID NO: 1459 - RNA, 17 nt, Hepatitis B virus
augugucugcggcguuu

SEQ ID NO: 1460 - RNA, 17 nt, Hepatitis B virus
cuuccucugcauccugc

SEQ ID NO: 1461 - RNA, 17 nt, Hepatitis B virus
ugcauccugcugcuaug

SEQ ID NO: 1462 - RNA, 17 nt, Hepatitis B virus
auccugcugcuaugccu

SEQ ID NO: 1463 - RNA, 17 nt, Hepatitis B virus
gcugcuaugccucaucu

SEQ ID NO: 1464 - RNA, 17 nt, Hepatitis B virus
gguauguugcccguuug

SEQ ID NO: 1465 - RNA, 17 nt, Hepatitis B virus
cggaccaugcaaaaccu

SEQ ID NO: 1466 - RNA, 17 nt, Hepatitis B virus
caaaaccugcacaacuc

SEQ ID NO: 1467 - RNA, 17 nt, Hepatitis B virus
caacuccugcucaagga

SEQ ID NO: 1468 - RNA, 17 nt, Hepatitis B virus
cucauguugcuguacaa

SEQ ID NO: 1469 - RNA, 17 nt, Hepatitis B virus
cggaaacugcaccugua

SEQ ID NO: 1470 - RNA, 17 nt, Hepatitis B virus
gggcuuucgcaaaauac

SEQ ID NO: 1471 - RNA, 17 nt, Hepatitis B virus
uuacuagugccauuugu

SEQ ID NO: 1472 - RNA, 17 nt, Hepatitis B virus
auauggaugaugugguu

SEQ ID NO: 1473 - RNA, 17 nt, Hepatitis B virus
aacaucuugagucccuu

SEQ ID NO: 1474 - RNA, 17 nt, Hepatitis B virus
cccuuuaugccgcuguu

SEQ ID NO: 1475 - RNA, 17 nt, Hepatitis B virus
uuuaugccgcuguuacc

SEQ ID NO: 1476 - RNA, 17 nt, Hepatitis B virus
ggcacauugccacagga

SEQ ID NO: 1477 - RNA, 17 nt, Hepatitis B virus
ggccuauugauuggaaa

SEQ ID NO: 1478 - RNA, 17 nt, Hepatitis B virus
augucaacgaauugugg

SEQ ID NO: 1479 - RNA, 17 nt, Hepatitis B virus
ugggguuugccgccccu

SEQ ID NO: 1480 - RNA, 17 nt, Hepatitis B virus
gguuugccgccccuuuc

SEQ ID NO: 1481 - RNA, 17 nt, Hepatitis B virus
ccuuucacgcaaugugg

SEQ ID NO: 1482 - RNA, 17 nt, Hepatitis B virus
gauauucugcuuuaaug

SEQ ID NO: 1483 - RNA, 17 nt, Hepatitis B virus
gcuuuaaugccuuuaua

SEQ ID NO: 1484 - RNA, 17 nt, Hepatitis B virus
cuuuauaugcaugcaua

SEQ ID NO: 1485 - RNA, 17 nt, Hepatitis B virus
auaugcaugcauacaag

SEQ ID NO: 1486 - RNA, 17 nt, Hepatitis B virus
acuuucucgccaacuua

SEQ ID NO: 1487 - RNA, 17 nt, Hepatitis B virus
caguaugugaaccuuua

SEQ ID NO: 1488 - RNA, 17 nt, Hepatitis B virus
accccguugcucggcaa

SEQ ID NO: 1489 - RNA, 17 nt, Hepatitis B virus
uggucuaugccaagugu

SEQ ID NO: 1490 - RNA, 17 nt, Hepatitis B virus
aaguguuugcugacgca

SEQ ID NO: 1491 - RNA, 17 nt, Hepatitis B virus
uguuugcugacgcaacc

SEQ ID NO: 1492 - RNA, 17 nt, Hepatitis B virus
uugcugacgcaaccccc

SEQ ID NO: 1493 - RNA, 17 nt, Hepatitis B virus
ccaucagcgcaugcgug

SEQ ID NO: 1494 - RNA, 17 nt, Hepatitis B virus
cagcgcaugcguggaac

SEQ ID NO: 1495 - RNA, 17 nt, Hepatitis B virus
ucuccucugccgaucca

SEQ ID NO: 1496 - RNA, 17 nt, Hepatitis B virus
ccucugccgauccauac

SEQ ID NO: 1497 - RNA, 17 nt, Hepatitis B virus
uccauaccgcggaacuc

SEQ ID NO: 1498 - RNA, 17 nt, Hepatitis B virus
uccuagccgcuuguuuu

SEQ ID NO: 1499 - RNA, 17 nt, Hepatitis B virus
cuuguuuugcucgcagc

SEQ ID NO: 1500 - RNA, 17 nt, Hepatitis B virus
uuuugcucgcagcaggu

SEQ ID NO: 1501 - RNA, 17 nt, Hepatitis B virus
ucgggacugacaauucu

SEQ ID NO: 1502 - RNA, 17 nt, Hepatitis B virus
ucugucgugcucucccg

SEQ ID NO: 1503 - RNA, 17 nt, Hepatitis B virus
gcucucccgcaaauaua

SEQ ID NO: 1504 - RNA, 17 nt, Hepatitis B virus
ccauggcugcuaggcug

SEQ ID NO: 1505 - RNA, 17 nt, Hepatitis B virus
uaggcugugcugccaac

SEQ ID NO: 1506 - RNA, 17 nt, Hepatitis B virus
gcugugcugccaacugg

SEQ ID NO: 1507 - RNA, 17 nt, Hepatitis B virus
gauccuacgcgggacgu

SEQ ID NO: 1508 - RNA, 17 nt, Hepatitis B virus
ccgucggcgcugaaucc

SEQ ID NO: 1509 - RNA, 17 nt, Hepatitis B virus
ucggcgcugaaucccgc

SEQ ID NO: 1510 - RNA, 17 nt, Hepatitis B virus
ugaaucccgcggacgac

SEQ ID NO: 1511 - RNA, 17 nt, Hepatitis B virus
ccgcggacgaccccucc

SEQ ID NO: 1512 - RNA, 17 nt, Hepatitis B virus
ccggggccgcuuggggc

SEQ ID NO: 1513 - RNA, 17 nt, Hepatitis B virus
gcucuaccgcccgcuuc

SEQ ID NO: 1514 - RNA, 17 nt, Hepatitis B virus
uaccgcccgcuucuccg

SEQ ID NO: 1515 - RNA, 17 nt, Hepatitis B virus
gcuucuccgccuauugu

SEQ ID NO: 1516 - RNA, 17 nt, Hepatitis B virus
auuguaccgaccgucca

SEQ ID NO: 1517 - RNA, 17 nt, Hepatitis B virus
cacggggcgcaccucuc

SEQ ID NO: 1518 - RNA, 17 nt, Hepatitis B virus
cucuuuacgcggacucc

SEQ ID NO: 1519 - RNA, 17 nt, Hepatitis B virus
ccgucugugccuucuca

SEQ ID NO: 1520 - RNA, 17 nt, Hepatitis B virus
ucucaucugccggaccg

SEQ ID NO: 1521 - RNA, 17 nt, Hepatitis B virus
gaccgugugcacuucgc

SEQ ID NO: 1522 - RNA, 17 nt, Hepatitis B virus
ugcacuucgcuucaccu

SEQ ID NO: 1523 - RNA, 17 nt, Hepatitis B virus
ucaccucugcacgucgc

SEQ ID NO: 1524 - RNA, 17 nt, Hepatitis B virus
ugcacgucgcauggaga

SEQ ID NO: 1525 - RNA, 17 nt, Hepatitis B virus
accaccgugaacgccca

SEQ ID NO: 1526 - RNA, 17 nt, Hepatitis B virus
ccgugaacgcccacagg

SEQ ID NO: 1527 - RNA, 17 nt, Hepatitis B virus
aggaaccugcccaaggu

SEQ ID NO: 1528 - RNA, 17 nt, Hepatitis B virus
aaggucuugcauaagag

SEQ ID NO: 1529 - RNA, 17 nt, Hepatitis B virus
augucaacgaccgaccu

SEQ ID NO: 1530 - RNA, 17 nt, Hepatitis B virus
caacgaccgaccuugag

SEQ ID NO: 1531 - RNA, 17 nt, Hepatitis B virus
ccgaccuugaggcauac

SEQ ID NO: 1532 - RNA, 17 nt, Hepatitis B virus
uguuuaaugagugggag

SEQ ID NO: 1533 - RNA, 17 nt, Hepatitis B virus
agcaccaugcaacuuuu

SEQ ID NO: 1534 - RNA, 17 nt, Hepatitis B virus
ucaccucugccuaauca

SEQ ID NO: 1535 - RNA, 17 nt, Hepatitis B virus
caagcugugccuugggu

SEQ ID NO: 1536 - RNA, 17 nt, Hepatitis B virus
uggacauugacccguau

SEQ ID NO: 1537 - RNA, 17 nt, Hepatitis B virus
ucuuuuuugccuucuga

SEQ ID NO: 1538 - RNA, 17 nt, Hepatitis B virus
ugccuucugacuucuuu

SEQ ID NO: 1539 - RNA, 17 nt, Hepatitis B virus
uucuauucgagaucucc

SEQ ID NO: 1540 - RNA, 17 nt, Hepatitis B virus
aucuccucgacaccgcc

SEQ ID NO: 1541 - RNA, 17 nt, Hepatitis B virus
ucgacaccgccucugcu

SEQ ID NO: 1542 - RNA, 17 nt, Hepatitis B virus
ccgccucugcucuguau

SEQ ID NO: 1543 - RNA, 17 nt, Hepatitis B virus
guuggggugaguugaug

SEQ ID NO: 1544 - RNA, 17 nt, Hepatitis B virus
ggugaguugaugaaucu

SEQ ID NO: 1545 - RNA, 17 nt, Hepatitis B virus
gaguugaugaaucuagc

SEQ ID NO: 1546 - RNA, 17 nt, Hepatitis B virus
uuuugggcgagaaacug

SEQ ID NO: 1547 - RNA, 17 nt, Hepatitis B virus
cuguucuugaauauuug

SEQ ID NO: 1548 - RNA, 17 nt, Hepatitis B virus
guggauucgcacuccuc

SEQ ID NO: 1549 - RNA, 17 nt, Hepatitis B virus
cuccuccugcauauaga

SEQ ID NO: 1550 - RNA, 17 nt, Hepatitis B virus
caccaaaugccccuauc

SEQ ID NO: 1551 - RNA, 17 nt, Hepatitis B virus
uguuagacgaagaggca

SEQ ID NO: 1552 - RNA, 17 nt, Hepatitis B virus
acucccucgccucgcag

SEQ ID NO: 1553 - RNA, 17 nt, Hepatitis B virus
cucgccucgcagacgaa

SEQ ID NO: 1554 - RNA, 17 nt, Hepatitis B virus
ucgcagacgaaggucuc

SEQ ID NO: 1555 - RNA, 17 nt, Hepatitis B virus
ucucaaucgccgcgucg

SEQ ID NO: 1556 - RNA, 17 nt, Hepatitis B virus
caaucgccgcgucgcag

SEQ ID NO: 1557 - RNA, 17 nt, Hepatitis B virus
gccgcgucgcagaagau

SEQ ID NO: 1558 - RNA, 17 nt, Hepatitis B virus
gguaccuugcuuuaauc

SEQ ID NO: 1559 - RNA, 17 nt, Hepatitis B virus
cuuuuccugacauucau

SEQ ID NO: 1560 - RNA, 17 nt, Hepatitis B virus
auucauuugcaggagga

SEQ ID NO: 1561 - RNA, 17 nt, Hepatitis B virus
acauuguugauagaugu

SEQ ID NO: 1562 - RNA, 17 nt, Hepatitis B virus
caguaaaugaaaacagg

SEQ ID NO: 1563 - RNA, 17 nt, Hepatitis B virus
uuaacuaugccugcuag

SEQ ID NO: 1564 - RNA, 17 nt, Hepatitis B virus
cuaugccugcuagguuu

SEQ ID NO: 1565 - RNA, 17 nt, Hepatitis B virus
aaauauuugcccuuaga

SEQ ID NO: 1566 - RNA, 17 nt, Hepatitis B virus
uuccagacgcgacauua

SEQ ID NO: 1567 - RNA, 17 nt, Hepatitis B virus
ccagacgcgacauuauu

SEQ ID NO: 1568 - RNA, 17 nt, Hepatitis B virus
cacguagcgccucauuu

SEQ ID NO: 1569 - RNA, 17 nt, Hepatitis B virus
cucauuuugcgggucac

SEQ ID NO: 1570 - RNA, 17 nt, Hepatitis B virus
caaaccucgaaaaggca

SEQ ID NO: 1571 - RNA, 17 nt, Hepatitis B virus
ucuuccccgaucaucag

SEQ ID NO: 1572 - RNA, 17 nt, Hepatitis B virus
uggacccugcauucaaa

SEQ ID NO: 1573 - RNA, 17 nt, Hepatitis B virus
cucaacccgcacaagga

SEQ ID NO: 1574 - RNA, 17 nt, Hepatitis B virus
ggccggacgccaacaag

SEQ ID NO: 1575 - RNA, 17 nt, Hepatitis B virus
gcccucacgcucagggc

SEQ ID NO: 1576 - RNA, 17 nt, Hepatitis B virus
acaacugugccagcagc

SEQ ID NO: 1577 - RNA, 17 nt, Hepatitis B virus
cuccuccugccuccacc

SEQ ID NO: 1578 - RNA, 17 nt, Hepatitis B virus
agggcccuguacuuucc

SEQ ID NO: 1579 - RNA, 17 nt, Hepatitis B virus
agaauacugucucugcc

SEQ ID NO: 1580 - RNA, 17 nt, Hepatitis B virus
gggacccuguaccgaac

SEQ ID NO: 1581 - RNA, 17 nt, Hepatitis B virus
cugcucguguuacaggc

SEQ ID NO: 1582 - RNA, 17 nt, Hepatitis B virus
uuuuucuuguugacaaa

SEQ ID NO: 1583 - RNA, 17 nt, Hepatitis B virus
acacccgugugucuugg

SEQ ID NO: 1584 - RNA, 17 nt, Hepatitis B virus
acccgugugucuuggcc

SEQ ID NO: 1585 - RNA, 17 nt, Hepatitis B virus
accaaccuguuguccuc

SEQ ID NO: 1586 - RNA, 17 nt, Hepatitis B virus
aaccuguuguccuccaa

SEQ ID NO: 1587 - RNA, 17 nt, Hepatitis B virus
uccaauuuguccugguu

SEQ ID NO: 1588 - RNA, 17 nt, Hepatitis B virus
cgcuggaugugucugcg

SEQ ID NO: 1589 - RNA, 17 nt, Hepatitis B virus
cuggaugugucugcggc

SEQ ID NO: 1590 - RNA, 17 nt, Hepatitis B virus
aucuucuuguugguucu

SEQ ID NO: 1591 - RNA, 17 nt, Hepatitis B virus
caagguauguugcccgu

SEQ ID NO: 1592 - RNA, 17 nt, Hepatitis B virus
gcccguuuguccucuaa

SEQ ID NO: 1593 - RNA, 17 nt, Hepatitis B virus
accucuauguuucccuc

SEQ ID NO: 1594 - RNA, 17 nt, Hepatitis B virus
ucccucauguugcugua

SEQ ID NO: 1595 - RNA, 17 nt, Hepatitis B virus
auguugcuguacaaaac

SEQ ID NO: 1596 - RNA, 17 nt, Hepatitis B virus
cugcaccuguauuccca

SEQ ID NO: 1597 - RNA, 17 nt, Hepatitis B virus
ugccauuuguucagugg

SEQ ID NO: 1598 - RNA, 17 nt, Hepatitis B virus
cccccacugucuggcuu

SEQ ID NO: 1599 - RNA, 17 nt, Hepatitis B virus
uggaugaugugguuuug

SEQ ID NO: 1600 - RNA, 17 nt, Hepatitis B virus
ccaagucuguacaacau

SEQ ID NO: 1601 - RNA, 17 nt, Hepatitis B virus
augccgcuguuaccaau

SEQ ID NO: 1602 - RNA, 17 nt, Hepatitis B virus
uuucuuuugucuuuggg

SEQ ID NO: 1603 - RNA, 17 nt, Hepatitis B virus
ugggauauguaauuggg

SEQ ID NO: 1604 - RNA, 17 nt, Hepatitis B virus
aacauauuguacaaaaa

SEQ ID NO: 1605 - RNA, 17 nt, Hepatitis B virus
aucaaaauguguuuuag

SEQ ID NO: 1606 - RNA, 17 nt, Hepatitis B virus
caaaauguguuuuagga

SEQ ID NO: 1607 - RNA, 17 nt, Hepatitis B virus
aacuuccuguaaacagg

SEQ ID NO: 1608 - RNA, 17 nt, Hepatitis B virus
gaaaguaugucaacgaa

SEQ ID NO: 1609 - RNA, 17 nt, Hepatitis B virus
aacgaauugugggucuu

SEQ ID NO: 1610 - RNA, 17 nt, Hepatitis B virus
cacgcaauguggauauu

SEQ ID NO: 1611 - RNA, 17 nt, Hepatitis B virus
aacaguaugugaaccuu

SEQ ID NO: 1612 - RNA, 17 nt, Hepatitis B virus
ugccaaguguuugcuga

SEQ ID NO: 1613 - RNA, 17 nt, Hepatitis B virus
gaaccuuugugucuccu

SEQ ID NO: 1614 - RNA, 17 nt, Hepatitis B virus
accuuugugucuccucu

SEQ ID NO: 1615 - RNA, 17 nt, Hepatitis B virus
agccgcuuguuuugcuc

SEQ ID NO: 1616 - RNA, 17 nt, Hepatitis B virus
acaauucugucgugcuc

SEQ ID NO: 1617 - RNA, 17 nt, Hepatitis B virus
gcuaggcugugcugcca

SEQ ID NO: 1618 - RNA, 17 nt, Hepatitis B virus
cguccuuuguuuacguc

SEQ ID NO: 1619 - RNA, 17 nt, Hepatitis B virus
cgccuauuguaccgacc

SEQ ID NO: 1620 - RNA, 17 nt, Hepatitis B virus
ccccgucugugccuucu

SEQ ID NO: 1621 - RNA, 17 nt, Hepatitis B virus
cggaccgugugcacuuc

SEQ ID NO: 1622 - RNA, 17 nt, Hepatitis B virus
ucagcaaugucaacgac

SEQ ID NO: 1623 - RNA, 17 nt, Hepatitis B virus
caaagacuguguguuua

SEQ ID NO: 1624 - RNA, 17 nt, Hepatitis B virus
aagacuguguguuuaau

SEQ ID NO: 1625 - RNA, 17 nt, Hepatitis B virus
gacuguguguuuaauga

SEQ ID NO: 1626 - RNA, 17 nt, Hepatitis B virus
aggucuuuguacuagga

SEQ ID NO: 1627 - RNA, 17 nt, Hepatitis B virus
aggaggcuguaggcaua

SEQ ID NO: 1628 - RNA, 17 nt, Hepatitis B virus
aaauugguguguucacc

SEQ ID NO: 1629 - RNA, 17 nt, Hepatitis B virus
auugguguguucaccag

SEQ ID NO: 1630 - RNA, 17 nt, Hepatitis B virus
caucucauguucauguc

SEQ ID NO: 1631 - RNA, 17 nt, Hepatitis B virus
auguucauguccuacug

SEQ ID NO: 1632 - RNA, 17 nt, Hepatitis B virus
guccuacuguucaagcc

SEQ ID NO: 1633 - RNA, 17 nt, Hepatitis B virus
uccaagcugugccuugg

SEQ ID NO: 1634 - RNA, 17 nt, Hepatitis B virus
gagcuucuguggaguua

SEQ ID NO: 1635 - RNA, 17 nt, Hepatitis B virus
ucugcucuguaucgggg

SEQ ID NO: 1636 - RNA, 17 nt, Hepatitis B virus
ggaacauuguucaccuc

SEQ ID NO: 1637 - RNA, 17 nt, Hepatitis B virus
gcuauucuguguugggg

SEQ ID NO: 1638 - RNA, 17 nt, Hepatitis B virus
uauucuguguuggggug

SEQ ID NO: 1639 - RNA, 17 nt, Hepatitis B virus
ucagcuaugucaacguu

SEQ ID NO: 1640 - RNA, 17 nt, Hepatitis B virus
caacuauugugguuuca

SEQ ID NO: 1641 - RNA, 17 nt, Hepatitis B virus
cauuuccugucuuacuu

SEQ ID NO: 1642 - RNA, 17 nt, Hepatitis B virus
gagaaacuguucuugaa

SEQ ID NO: 1643 - RNA, 17 nt, Hepatitis B virus
uauuuggugucuuuugg

SEQ ID NO: 1644 - RNA, 17 nt, Hepatitis B virus
uuuggaguguggauucg

SEQ ID NO: 1645 - RNA, 17 nt, Hepatitis B virus
aaacuacuguuguuaga

SEQ ID NO: 1646 - RNA, 17 nt, Hepatitis B virus
cuacuguuguuagacga

SEQ ID NO: 1647 - RNA, 17 nt, Hepatitis B virus
aucucaauguuaguauu

SEQ ID NO: 1648 - RNA, 17 nt, Hepatitis B virus
aggacauuguugauaga

SEQ ID NO: 1649 - RNA, 17 nt, Hepatitis B virus
ugauagauguaagcaau

SEQ ID NO: 1650 - RNA, 17 nt, Hepatitis B virus
agcaauuuguggggccc

SEQ ID NO: 1651 - RNA, 17 nt, Hepatitis B virus
aucccaauguuacuaaa

SEQ ID NO: 1652 - RNA, 17 nt, Hepatitis B virus
cagaguauguaguuaau

SEQ ID NO: 1653 - RNA, 17 nt, Hepatitis B virus
aucuuucuguccccaau

SEQ ID NO: 1654 - RNA, 17 nt, Hepatitis B virus
gggggacuguuggggug

SEQ ID NO: 1655 - RNA, 17 nt, Hepatitis B virus
ucacaacugugccagca

SEQ ID NO: 1656 - RNA, 17 nt, Hepatitis B virus
aucccagagucagggcc

SEQ ID NO: 1657 - RNA, 17 nt, Hepatitis B virus
gagucagggcccuguac

SEQ ID NO: 1658 - RNA, 17 nt, Hepatitis B virus
uccugcugguggcucca

SEQ ID NO: 1659 - RNA, 17 nt, Hepatitis B virus
ugcugguggcuccaguu

SEQ ID NO: 1660 - RNA, 17 nt, Hepatitis B virus
uggcuccaguucaggaa

SEQ ID NO: 1661 - RNA, 17 nt, Hepatitis B virus
caggaacagugagcccu

SEQ ID NO: 1662 - RNA, 17 nt, Hepatitis B virus
aacagugagcccugcuc

SEQ ID NO: 1663 - RNA, 17 nt, Hepatitis B virus
gccauaucgucaaucuu

SEQ ID NO: 1664 - RNA, 17 nt, Hepatitis B virus
cccugcucguguuacag

SEQ ID NO: 1665 - RNA, 17 nt, Hepatitis B virus
uguuacaggcgggguuu

SEQ ID NO: 1666 - RNA, 17 nt, Hepatitis B virus
caggcgggguuuuucuu

SEQ ID NO: 1667 - RNA, 17 nt, Hepatitis B virus
accacagagucuagacu

SEQ ID NO: 1668 - RNA, 17 nt, Hepatitis B virus
cuagacucgugguggac

SEQ ID NO: 1669 - RNA, 17 nt, Hepatitis B virus
gacucgugguggacuuc

SEQ ID NO: 1670 - RNA, 17 nt, Hepatitis B virus
gaacacccgugugucuu

SEQ ID NO: 1671 - RNA, 17 nt, Hepatitis B virus
gugucuuggccaaaauu

SEQ ID NO: 1672 - RNA, 17 nt, Hepatitis B virus
aauucgcagucccaaau

SEQ ID NO: 1673 - RNA, 17 nt, Hepatitis B virus
aaucuccagucacucac

SEQ ID NO: 1674 - RNA, 17 nt, Hepatitis B virus
uuguccugguuaucgcu

SEQ ID NO: 1675 - RNA, 17 nt, Hepatitis B virus
ugucugcggcguuuuau

SEQ ID NO: 1676 - RNA, 17 nt, Hepatitis B virus
ucugcggcguuuuauca

SEQ ID NO: 1677 - RNA, 17 nt, Hepatitis B virus
ucuuguugguucuucug

SEQ ID NO: 1678 - RNA, 17 nt, Hepatitis B virus
cuaucaagguauguugc

SEQ ID NO: 1679 - RNA, 17 nt, Hepatitis B virus
uguugcccguuuguccu

SEQ ID NO: 1680 - RNA, 17 nt, Hepatitis B virus
aacaaccagcaccggac

SEQ ID NO: 1681 - RNA, 17 nt, Hepatitis B virus
caucuugggcuuucgca

SEQ ID NO: 1682 - RNA, 17 nt, Hepatitis B virus
cuaugggagugggccuc

SEQ ID NO: 1683 - RNA, 17 nt, Hepatitis B virus
gggagugggccucaguc

SEQ ID NO: 1684 - RNA, 17 nt, Hepatitis B virus
gggccucaguccguuuc

SEQ ID NO: 1685 - RNA, 17 nt, Hepatitis B virus
cucaguccguuucucuu

SEQ ID NO: 1686 - RNA, 17 nt, Hepatitis B virus
uucucuuggcucaguuu

SEQ ID NO: 1687 - RNA, 17 nt, Hepatitis B virus
uuggcucaguuuacuag

SEQ ID NO: 1688 - RNA, 17 nt, Hepatitis B virus
guuuacuagugccauuu

SEQ ID NO: 1689 - RNA, 17 nt, Hepatitis B virus
uuuguucagugguucgu

SEQ ID NO: 1690 - RNA, 17 nt, Hepatitis B virus
guucagugguucguagg

SEQ ID NO: 1691 - RNA, 17 nt, Hepatitis B virus
agugguucguagggcuu

SEQ ID NO: 1692 - RNA, 17 nt, Hepatitis B virus
uucguagggcuuucccc

SEQ ID NO: 1693 - RNA, 17 nt, Hepatitis B virus
acugucuggcuuucagu

SEQ ID NO: 1694 - RNA, 17 nt, Hepatitis B virus
ggcuuucaguuauaugg

SEQ ID NO: 1695 - RNA, 17 nt, Hepatitis B virus
augaugugguuuugggg

SEQ ID NO: 1696 - RNA, 17 nt, Hepatitis B virus
uuuugggggccaagucu

SEQ ID NO: 1697 - RNA, 17 nt, Hepatitis B virus
ggggccaagucuguaca

SEQ ID NO: 1698 - RNA, 17 nt, Hepatitis B virus
caucuugagucccuuua

SEQ ID NO: 1699 - RNA, 17 nt, Hepatitis B virus
gucuuuggguauacauu

SEQ ID NO: 1700 - RNA, 17 nt, Hepatitis B virus
aauugggaguuggggca

SEQ ID NO: 1701 - RNA, 17 nt, Hepatitis B virus
gaguuggggcacauugc

SEQ ID NO: 1702 - RNA, 17 nt, Hepatitis B virus
guaaacaggccuauuga

SEQ ID NO: 1703 - RNA, 17 nt, Hepatitis B virus
auuggaaaguaugucaa

SEQ ID NO: 1704 - RNA, 17 nt, Hepatitis B virus
aauugugggucuuuugg

SEQ ID NO: 1705 - RNA, 17 nt, Hepatitis B virus
cuuuugggguuugccgc

SEQ ID NO: 1706 - RNA, 17 nt, Hepatitis B virus
gcauacaagcaaaacag

SEQ ID NO: 1707 - RNA, 17 nt, Hepatitis B virus
caaaacaggcuuuuacu

SEQ ID NO: 1708 - RNA, 17 nt, Hepatitis B virus
cuuacaaggccuuucua

SEQ ID NO: 1709 - RNA, 17 nt, Hepatitis B virus
cuuucuaaguaaacagu

SEQ ID NO: 1710 - RNA, 17 nt, Hepatitis B virus
aguaaacaguaugugaa

SEQ ID NO: 1711 - RNA, 17 nt, Hepatitis B virus
uuuaccccguugcucgg

SEQ ID NO: 1712 - RNA, 17 nt, Hepatitis B virus
guugcucggcaacggcc

SEQ ID NO: 1713 - RNA, 17 nt, Hepatitis B virus
cggcaacggccuggucu

SEQ ID NO: 1714 - RNA, 17 nt, Hepatitis B virus
acggccuggucuaugcc

SEQ ID NO: 1715 - RNA, 17 nt, Hepatitis B virus
uaugccaaguguuugcu

SEQ ID NO: 1716 - RNA, 17 nt, Hepatitis B virus
ccccacugguuggggcu

SEQ ID NO: 1717 - RNA, 17 nt, Hepatitis B virus
ugguuggggcuuggcca

SEQ ID NO: 1718 - RNA, 17 nt, Hepatitis B virus
ggggcuuggccauaggc

SEQ ID NO: 1719 - RNA, 17 nt, Hepatitis B virus
ggccauaggccaucagc

SEQ ID NO: 1720 - RNA, 17 nt, Hepatitis B virus
ggccaucagcgcaugcg

SEQ ID NO: 1721 - RNA, 17 nt, Hepatitis B virus
gcgcaugcguggaaccu

SEQ ID NO: 1722 - RNA, 17 nt, Hepatitis B virus
aacuccuagccgcuugu

SEQ ID NO: 1723 - RNA, 17 nt, Hepatitis B virus
ugcucgcagcaggucug

SEQ ID NO: 1724 - RNA, 17 nt, Hepatitis B virus
cgcagcaggucuggggc

SEQ ID NO: 1725 - RNA, 17 nt, Hepatitis B virus
ggucuggggcaaaacuc

SEQ ID NO: 1726 - RNA, 17 nt, Hepatitis B virus
auucugucgugcucucc

SEQ ID NO: 1727 - RNA, 17 nt, Hepatitis B virus
uuuccauggcugcuagg

SEQ ID NO: 1728 - RNA, 17 nt, Hepatitis B virus
gcugcuaggcugugcug

SEQ ID NO: 1729 - RNA, 17 nt, Hepatitis B virus
cgcgggacguccuuugu

SEQ ID NO: 1730 - RNA, 17 nt, Hepatitis B virus
uuguuuacgucccgucg

SEQ ID NO: 1731 - RNA, 17 nt, Hepatitis B virus
uacgucccgucggcgcu

SEQ ID NO: 1732 - RNA, 17 nt, Hepatitis B virus
ucccgucggcgcugaau

SEQ ID NO: 1733 - RNA, 17 nt, Hepatitis B virus
cucccggggccgcuugg

SEQ ID NO: 1734 - RNA, 17 nt, Hepatitis B virus
cgcuuggggcucuaccg

SEQ ID NO: 1735 - RNA, 17 nt, Hepatitis B virus
uaccgaccguccacggg

SEQ ID NO: 1736 - RNA, 17 nt, Hepatitis B virus
uccacggggcgcaccuc

SEQ ID NO: 1737 - RNA, 17 nt, Hepatitis B virus
gacuccccgucugugcc

SEQ ID NO: 1738 - RNA, 17 nt, Hepatitis B virus
gccggaccgugugcacu

SEQ ID NO: 1739 - RNA, 17 nt, Hepatitis B virus
cucugcacgucgcaugg

SEQ ID NO: 1740 - RNA, 17 nt, Hepatitis B virus
agaccaccgugaacgcc

SEQ ID NO: 1741 - RNA, 17 nt, Hepatitis B virus
ugcccaaggucuugcau

SEQ ID NO: 1742 - RNA, 17 nt, Hepatitis B virus
gacuuucagcaauguca

SEQ ID NO: 1743 - RNA, 17 nt, Hepatitis B virus
accuugaggcauacuuc

SEQ ID NO: 1744 - RNA, 17 nt, Hepatitis B virus
uuuaaugagugggagga

SEQ ID NO: 1745 - RNA, 17 nt, Hepatitis B virus
ugggaggaguuggggga

SEQ ID NO: 1746 - RNA, 17 nt, Hepatitis B virus
gggaggagguuagguua

SEQ ID NO: 1747 - RNA, 17 nt, Hepatitis B virus
gagguuagguuaaaggu

SEQ ID NO: 1748 - RNA, 17 nt, Hepatitis B virus
gguuaaaggucuuugua

SEQ ID NO: 1749 - RNA, 17 nt, Hepatitis B virus
acuaggaggcuguaggc

SEQ ID NO: 1750 - RNA, 17 nt, Hepatitis B virus
ggcuguaggcauaaauu

SEQ ID NO: 1751 - RNA, 17 nt, Hepatitis B virus
auaaauugguguguuca

SEQ ID NO: 1752 - RNA, 17 nt, Hepatitis B virus
guucaccagcaccaugc

SEQ ID NO: 1753 - RNA, 17 nt, Hepatitis B virus
cuguucaagccuccaag

SEQ ID NO: 1754 - RNA, 17 nt, Hepatitis B virus
gccuccaagcugugccu

SEQ ID NO: 1755 - RNA, 17 nt, Hepatitis B virus
ugccuuggguggcuuug

SEQ ID NO: 1756 - RNA, 17 nt, Hepatitis B virus
cuuggguggcuuugggg

SEQ ID NO: 1757 - RNA, 17 nt, Hepatitis B virus
gcuuuggggcauggaca

SEQ ID NO: 1758 - RNA, 17 nt, Hepatitis B virus
auugacccguauaaaga

SEQ ID NO: 1759 - RNA, 17 nt, Hepatitis B virus
aauuuggagcuucugug

SEQ ID NO: 1760 - RNA, 17 nt, Hepatitis B virus
ucuguggaguuacucuc

SEQ ID NO: 1761 - RNA, 17 nt, Hepatitis B virus
aucggggggccuuagag

SEQ ID NO: 1762 - RNA, 17 nt, Hepatitis B virus
gccuuagagucuccgga

SEQ ID NO: 1763 - RNA, 17 nt, Hepatitis B virus
accauacggcacucagg

SEQ ID NO: 1764 - RNA, 17 nt, Hepatitis B virus
gcacucaggcaagcuau

SEQ ID NO: 1765 - RNA, 17 nt, Hepatitis B virus
ucaggcaagcuauucug

SEQ ID NO: 1766 - RNA, 17 nt, Hepatitis B virus
guguuggggugaguuga

SEQ ID NO: 1767 - RNA, 17 nt, Hepatitis B virus
uggggugaguugaugaa

SEQ ID NO: 1768 - RNA, 17 nt, Hepatitis B virus
ugaaucuagccaccugg

SEQ ID NO: 1769 - RNA, 17 nt, Hepatitis B virus
ccaccugggugggaagu

SEQ ID NO: 1770 - RNA, 17 nt, Hepatitis B virus
ggugggaaguaauuugg

SEQ ID NO: 1771 - RNA, 17 nt, Hepatitis B virus
aagauccagcauccagg

SEQ ID NO: 1772 - RNA, 17 nt, Hepatitis B virus
gggaauuaguagucagc

SEQ ID NO: 1773 - RNA, 17 nt, Hepatitis B virus
aauuaguagucagcuau

SEQ ID NO: 1774 - RNA, 17 nt, Hepatitis B virus
aguagucagcuauguca

SEQ ID NO: 1775 - RNA, 17 nt, Hepatitis B virus
augucaacguuaauaug

SEQ ID NO: 1776 - RNA, 17 nt, Hepatitis B virus
uaauaugggccuaaaaa

SEQ ID NO: 1777 - RNA, 17 nt, Hepatitis B virus
cuauugugguuucacau

SEQ ID NO: 1778 - RNA, 17 nt, Hepatitis B virus
acuuuugggcgagaaac

SEQ ID NO: 1779 - RNA, 17 nt, Hepatitis B virus
aauauuuggugucuuuu

SEQ ID NO: 1780 - RNA, 17 nt, Hepatitis B virus
cuuuuggaguguggauu

SEQ ID NO: 1781 - RNA, 17 nt, Hepatitis B virus
acgaagaggcagguccc

SEQ ID NO: 1782 - RNA, 17 nt, Hepatitis B virus
agaggcagguccccuag

SEQ ID NO: 1783 - RNA, 17 nt, Hepatitis B virus
agacgaaggucucaauc

SEQ ID NO: 1784 - RNA, 17 nt, Hepatitis B virus
aucgccgcgucgcagaa

SEQ ID NO: 1785 - RNA, 17 nt, Hepatitis B virus
caauguuaguauuccuu

SEQ ID NO: 1786 - RNA, 17 nt, Hepatitis B virus
cacauaaggugggaaac

SEQ ID NO: 1787 - RNA, 17 nt, Hepatitis B virus
uuuacggggcuuuauuc

SEQ ID NO: 1788 - RNA, 17 nt, Hepatitis B virus
cuucuacgguaccuugc

SEQ ID NO: 1789 - RNA, 17 nt, Hepatitis B virus
ccuaaauggcaaacucc

SEQ ID NO: 1790 - RNA, 17 nt, Hepatitis B virus
agauguaagcaauuugu

SEQ ID NO: 1791 - RNA, 17 nt, Hepatitis B virus
uuuguggggccccuuac

SEQ ID NO: 1792 - RNA, 17 nt, Hepatitis B virus
cccuuacaguaaaugaa

SEQ ID NO: 1793 - RNA, 17 nt, Hepatitis B virus
ccugcuagguuuuaucc

SEQ ID NO: 1794 - RNA, 17 nt, Hepatitis B virus
aucaaaccguauuaucc

SEQ ID NO: 1795 - RNA, 17 nt, Hepatitis B virus
uauccagaguauguagu

SEQ ID NO: 1796 - RNA, 17 nt, Hepatitis B virus
aguauguaguuaaucau

SEQ ID NO: 1797 - RNA, 17 nt, Hepatitis B virus
uuuggaaggcggggauc

SEQ ID NO: 1798 - RNA, 17 nt, Hepatitis B virus
aaaagagaguccacacg

SEQ ID NO: 1799 - RNA, 17 nt, Hepatitis B virus
guccacacguagcgccu

SEQ ID NO: 1800 - RNA, 17 nt, Hepatitis B virus
cacacguagcgccucau

SEQ ID NO: 1801 - RNA, 17 nt, Hepatitis B virus
uuuugcgggucaccaua

SEQ ID NO: 1802 - RNA, 17 nt, Hepatitis B virus
gaucuacagcaugggag

SEQ ID NO: 1803 - RNA, 17 nt, Hepatitis B virus
caugggagguuggucuu

SEQ ID NO: 1804 - RNA, 17 nt, Hepatitis B virus
ggagguuggucuuccaa

SEQ ID NO: 1805 - RNA, 17 nt, Hepatitis B virus
ucgaaaaggcaugggga

SEQ ID NO: 1806 - RNA, 17 nt, Hepatitis B virus
gaucaucaguuggaccc

SEQ ID NO: 1807 - RNA, 17 nt, Hepatitis B virus
cauucaaagccaacuca

SEQ ID NO: 1808 - RNA, 17 nt, Hepatitis B virus
ccaacucaguaaaucca

SEQ ID NO: 1809 - RNA, 17 nt, Hepatitis B virus
gacaacuggccggacgc

SEQ ID NO: 1810 - RNA, 17 nt, Hepatitis B virus
ccaacaaggugggagug

SEQ ID NO: 1811 - RNA, 17 nt, Hepatitis B virus
aggugggagugggagca

SEQ ID NO: 1812 - RNA, 17 nt, Hepatitis B virus
gagugggagcauucggg

SEQ ID NO: 1813 - RNA, 17 nt, Hepatitis B virus
gcauucgggccaggguu

SEQ ID NO: 1814 - RNA, 17 nt, Hepatitis B virus
gggccaggguucacccc

SEQ ID NO: 1815 - RNA, 17 nt, Hepatitis B virus
cuguugggguggagccc

SEQ ID NO: 1816 - RNA, 17 nt, Hepatitis B virus
gggguggagcccucacg

SEQ ID NO: 1817 - RNA, 17 nt, Hepatitis B virus
cgcucagggccuacuca

SEQ ID NO: 1818 - RNA, 17 nt, Hepatitis B virus
cugugccagcagcuccu

SEQ ID NO: 1819 - RNA, 17 nt, Hepatitis B virus
ugccagcagcuccuccu

SEQ ID NO: 1820 - RNA, 17 nt, Hepatitis B virus
accaaucggcagucagg

SEQ ID NO: 1821 - RNA, 17 nt, Hepatitis B virus
aaucggcagucaggaag

SEQ ID NO: 1822 - RNA, 17 nt, Hepatitis B virus
ucaggaaggcagccuac

SEQ ID NO: 1823 - RNA, 17 nt, Hepatitis B virus
ggaaggcagccuacucc

SEQ ID NO: 1824 - RNA, 17 nt, Hepatitis B virus
auccucaggccaugcag

SEQ ID NO: 1825 - RNA, 17 nt, Hepatitis B virus
acuccaccacuuuccac

SEQ ID NO: 1826 - RNA, 17 nt, Hepatitis B virus
cacuuuccaccaaacuc

SEQ ID NO: 1827 - RNA, 17 nt, Hepatitis B virus
uccaccaaacucuucaa

SEQ ID NO: 1828 - RNA, 17 nt, Hepatitis B virus
ucuucaagaucccagag

SEQ ID NO: 1829 - RNA, 17 nt, Hepatitis B virus
ggcccuguacuuuccug

SEQ ID NO: 1830 - RNA, 17 nt, Hepatitis B virus
guucaggaacagugagc

SEQ ID NO: 1831 - RNA, 17 nt, Hepatitis B virus
ugcucagaauacugucu

SEQ ID NO: 1832 - RNA, 17 nt, Hepatitis B virus
cucagaauacugucucu

SEQ ID NO: 1833 - RNA, 17 nt, Hepatitis B virus
ucucugccauaucguca

SEQ ID NO: 1834 - RNA, 17 nt, Hepatitis B virus
ucugccauaucgucaau

SEQ ID NO: 1835 - RNA, 17 nt, Hepatitis B virus
uaucgucaaucuuaucg

SEQ ID NO: 1836 - RNA, 17 nt, Hepatitis B virus
ucaaucuuaucgaagac

SEQ ID NO: 1837 - RNA, 17 nt, Hepatitis B virus
uaucgaagacuggggac

SEQ ID NO: 1838 - RNA, 17 nt, Hepatitis B virus
gacuggggacccuguac

SEQ ID NO: 1839 - RNA, 17 nt, Hepatitis B virus
gacccuguaccgaacau

SEQ ID NO: 1840 - RNA, 17 nt, Hepatitis B virus
uguaccgaacauggaga

SEQ ID NO: 1841 - RNA, 17 nt, Hepatitis B virus
uaccgaacauggagaac

SEQ ID NO: 1842 - RNA, 17 nt, Hepatitis B virus
cauggagaacaucgcau

SEQ ID NO: 1843 - RNA, 17 nt, Hepatitis B virus
uggagaacaucgcauca

SEQ ID NO: 1844 - RNA, 17 nt, Hepatitis B virus
aacaucgcaucaggacu

SEQ ID NO: 1845 - RNA, 17 nt, Hepatitis B virus
gcaucaggacuccuagg

SEQ ID NO: 1846 - RNA, 17 nt, Hepatitis B virus
cuccuaggaccccugcu

SEQ ID NO: 1847 - RNA, 17 nt, Hepatitis B virus
cucguguuacaggcggg

SEQ ID NO: 1848 - RNA, 17 nt, Hepatitis B virus
ucuuguugacaaaaauc

SEQ ID NO: 1849 - RNA, 17 nt, Hepatitis B virus
ugacaaaaauccucaca

SEQ ID NO: 1850 - RNA, 17 nt, Hepatitis B virus
aaauccucacaauacca

SEQ ID NO: 1851 - RNA, 17 nt, Hepatitis B virus
uccucacaauaccacag

SEQ ID NO: 1852 - RNA, 17 nt, Hepatitis B virus
cucacaauaccacagag

SEQ ID NO: 1853 - RNA, 17 nt, Hepatitis B virus
acaauaccacagagucu

SEQ ID NO: 1854 - RNA, 17 nt, Hepatitis B virus
gagucuagacucguggu

SEQ ID NO: 1855 - RNA, 17 nt, Hepatitis B virus
cgugguggacuucucuc

SEQ ID NO: 1856 - RNA, 17 nt, Hepatitis B virus
uucucucaauuuucuag

SEQ ID NO: 1857 - RNA, 17 nt, Hepatitis B virus
uagggggaacacccgug

SEQ ID NO: 1858 - RNA, 17 nt, Hepatitis B virus
gggggaacacccgugug

SEQ ID NO: 1859 - RNA, 17 nt, Hepatitis B virus
uggccaaaauucgcagu

SEQ ID NO: 1860 - RNA, 17 nt, Hepatitis B virus
agucccaaaucuccagu

SEQ ID NO: 1861 - RNA, 17 nt, Hepatitis B virus
cuccagucacucaccaa

SEQ ID NO: 1862 - RNA, 17 nt, Hepatitis B virus
agucacucaccaaccug

SEQ ID NO: 1863 - RNA, 17 nt, Hepatitis B virus
acucaccaaccuguugu

SEQ ID NO: 1864 - RNA, 17 nt, Hepatitis B virus
guccuccaauuuguccu

SEQ ID NO: 1865 - RNA, 17 nt, Hepatitis B virus
uccugguuaucgcugga

SEQ ID NO: 1866 - RNA, 17 nt, Hepatitis B virus
aucgcuggaugugucug

SEQ ID NO: 1867 - RNA, 17 nt, Hepatitis B virus
ggcguuuuaucaucuuc

SEQ ID NO: 1868 - RNA, 17 nt, Hepatitis B virus
guuuuaucaucuuccuc

SEQ ID NO: 1869 - RNA, 17 nt, Hepatitis B virus
uccucugcauccugcug

SEQ ID NO: 1870 - RNA, 17 nt, Hepatitis B virus
cugcugcuaugccucau

SEQ ID NO: 1871 - RNA, 17 nt, Hepatitis B virus
uaugccucaucuucuug

SEQ ID NO: 1872 - RNA, 17 nt, Hepatitis B virus
ucuucuggacuaucaag

SEQ ID NO: 1873 - RNA, 17 nt, Hepatitis B virus
ucuggacuaucaaggua

SEQ ID NO: 1874 - RNA, 17 nt, Hepatitis B virus
aucaagguauguugccc

SEQ ID NO: 1875 - RNA, 17 nt, Hepatitis B virus
guccucuaauuccagga

SEQ ID NO: 1876 - RNA, 17 nt, Hepatitis B virus
auuccaggaucaucaac

SEQ ID NO: 1877 - RNA, 17 nt, Hepatitis B virus
ccaggaucaucaacaac

SEQ ID NO: 1878 - RNA, 17 nt, Hepatitis B virus
gaucaucaacaaccagc

SEQ ID NO: 1879 - RNA, 17 nt, Hepatitis B virus
caucaacaaccagcacc

SEQ ID NO: 1880 - RNA, 17 nt, Hepatitis B virus
agcaccggaccaugcaa

SEQ ID NO: 1881 - RNA, 17 nt, Hepatitis B virus
accggaccaugcaaaac

SEQ ID NO: 1882 - RNA, 17 nt, Hepatitis B virus
caugcaaaaccugcaca

SEQ ID NO: 1883 - RNA, 17 nt, Hepatitis B virus
aaaccugcacaacuccu

SEQ ID NO: 1884 - RNA, 17 nt, Hepatitis B virus
ccugcacaacuccugcu

SEQ ID NO: 1885 - RNA, 17 nt, Hepatitis B virus
cucaaggaaccucuaug

SEQ ID NO: 1886 - RNA, 17 nt, Hepatitis B virus
gaaccucuauguuuccc

SEQ ID NO: 1887 - RNA, 17 nt, Hepatitis B virus
uuucccucauguugcug

SEQ ID NO: 1888 - RNA, 17 nt, Hepatitis B virus
guugcuguacaaaaccu

SEQ ID NO: 1889 - RNA, 17 nt, Hepatitis B virus
uguacaaaaccuacgga

SEQ ID NO: 1890 - RNA, 17 nt, Hepatitis B virus
caaaaccuacggacgga

SEQ ID NO: 1891 - RNA, 17 nt, Hepatitis B virus
accuacggacggaaacu

SEQ ID NO: 1892 - RNA, 17 nt, Hepatitis B virus
ggacggaaacugcaccu

SEQ ID NO: 1893 - RNA, 17 nt, Hepatitis B virus
gaaacugcaccuguauu

SEQ ID NO: 1894 - RNA, 17 nt, Hepatitis B virus
gcaccuguauucccauc

SEQ ID NO: 1895 - RNA, 17 nt, Hepatitis B virus
guauucccaucccauca

SEQ ID NO: 1896 - RNA, 17 nt, Hepatitis B virus
cccaucccaucaucuug

SEQ ID NO: 1897 - RNA, 17 nt, Hepatitis B virus
aucccaucaucuugggc

SEQ ID NO: 1898 - RNA, 17 nt, Hepatitis B virus
uucgcaaaauaccuaug

SEQ ID NO: 1899 - RNA, 17 nt, Hepatitis B virus
cgcaaaauaccuauggg

SEQ ID NO: 1900 - RNA, 17 nt, Hepatitis B virus
aaauaccuaugggagug

SEQ ID NO: 1901 - RNA, 17 nt, Hepatitis B virus
cucaguuuacuagugcc

SEQ ID NO: 1902 - RNA, 17 nt, Hepatitis B virus
cuagugccauuuguuca

SEQ ID NO: 1903 - RNA, 17 nt, Hepatitis B virus
uuucccccacugucugg

SEQ ID NO: 1904 - RNA, 17 nt, Hepatitis B virus
uuucaguuauauggaug

SEQ ID NO: 1905 - RNA, 17 nt, Hepatitis B virus
ucaguuauauggaugau

SEQ ID NO: 1906 - RNA, 17 nt, Hepatitis B virus
uuauauggaugaugugg

SEQ ID NO: 1907 - RNA, 17 nt, Hepatitis B virus
uauggaugaugugguuu

SEQ ID NO: 1908 - RNA, 17 nt, Hepatitis B virus
aagucuguacaacaucu

SEQ ID NO: 1909 - RNA, 17 nt, Hepatitis B virus
ucuguacaacaucuuga

SEQ ID NO: 1910 - RNA, 17 nt, Hepatitis B virus
uguacaacaucuugagu

SEQ ID NO: 1911 - RNA, 17 nt, Hepatitis B virus
gucccuuuaugccgcug

SEQ ID NO: 1912 - RNA, 17 nt, Hepatitis B virus
ccgcuguuaccaauuuu

SEQ ID NO: 1913 - RNA, 17 nt, Hepatitis B virus
uguuaccaauuuucuuu

SEQ ID NO: 1914 - RNA, 17 nt, Hepatitis B virus
cuuuggguauacauuua

SEQ ID NO: 1915 - RNA, 17 nt, Hepatitis B virus
uuggguauacauuuaaa

SEQ ID NO: 1916 - RNA, 17 nt, Hepatitis B virus
ggguauacauuuaaacc

SEQ ID NO: 1917 - RNA, 17 nt, Hepatitis B virus
acauuuaaacccucaca

SEQ ID NO: 1918 - RNA, 17 nt, Hepatitis B virus
aaacccucacaaaacaa

SEQ ID NO: 1919 - RNA, 17 nt, Hepatitis B virus
cucacaaaacaaaaaga

SEQ ID NO: 1920 - RNA, 17 nt, Hepatitis B virus
acaaaaagauggggaua

SEQ ID NO: 1921 - RNA, 17 nt, Hepatitis B virus
agauggggauauucccu

SEQ ID NO: 1922 - RNA, 17 nt, Hepatitis B virus
auggggauauucccuua

SEQ ID NO: 1923 - RNA, 17 nt, Hepatitis B virus
uucccuuaacuucaugg

SEQ ID NO: 1924 - RNA, 17 nt, Hepatitis B virus
uuaacuucaugggauau

SEQ ID NO: 1925 - RNA, 17 nt, Hepatitis B virus
uucaugggauauguaau

SEQ ID NO: 1926 - RNA, 17 nt, Hepatitis B virus
caugggauauguaauug

SEQ ID NO: 1927 - RNA, 17 nt, Hepatitis B virus
gauauguaauugggagu

SEQ ID NO: 1928 - RNA, 17 nt, Hepatitis B virus
guuggggcacauugcca

SEQ ID NO: 1929 - RNA, 17 nt, Hepatitis B virus
uggggcacauugccaca

SEQ ID NO: 1930 - RNA, 17 nt, Hepatitis B virus
acauugccacaggaaca

SEQ ID NO: 1931 - RNA, 17 nt, Hepatitis B virus
ccacaggaacauauugu

SEQ ID NO: 1932 - RNA, 17 nt, Hepatitis B virus
acaggaacauauuguac

SEQ ID NO: 1933 - RNA, 17 nt, Hepatitis B virus
aggaacauauuguacaa

SEQ ID NO: 1934 - RNA, 17 nt, Hepatitis B virus
cauauuguacaaaaaau

SEQ ID NO: 1935 - RNA, 17 nt, Hepatitis B virus
uacaaaaaaucaaaaug

SEQ ID NO: 1936 - RNA, 17 nt, Hepatitis B virus
aaaucaaaauguguuuu

SEQ ID NO: 1937 - RNA, 17 nt, Hepatitis B virus
uuuaggaaacuuccugu

SEQ ID NO: 1938 - RNA, 17 nt, Hepatitis B virus
uccuguaaacaggccua

SEQ ID NO: 1939 - RNA, 17 nt, Hepatitis B virus
acaggccuauugauugg

SEQ ID NO: 1940 - RNA, 17 nt, Hepatitis B virus
gccuauugauuggaaag

SEQ ID NO: 1941 - RNA, 17 nt, Hepatitis B virus
uggaaaguaugucaacg

SEQ ID NO: 1942 - RNA, 17 nt, Hepatitis B virus
guaugucaacgaauugu

SEQ ID NO: 1943 - RNA, 17 nt, Hepatitis B virus
gucaacgaauugugggu

SEQ ID NO: 1944 - RNA, 17 nt, Hepatitis B virus
ccccuuucacgcaaugu

SEQ ID NO: 1945 - RNA, 17 nt, Hepatitis B virus
uucacgcaauguggaua

SEQ ID NO: 1946 - RNA, 17 nt, Hepatitis B virus
caauguggauauucugc

SEQ ID NO: 1947 - RNA, 17 nt, Hepatitis B virus
auguggauauucugcuu

SEQ ID NO: 1948 - RNA, 17 nt, Hepatitis B virus
cugcuuuaaugccuuua

SEQ ID NO: 1949 - RNA, 17 nt, Hepatitis B virus
augccuuuauaugcaug

SEQ ID NO: 1950 - RNA, 17 nt, Hepatitis B virus
gccuuuauaugcaugca

SEQ ID NO: 1951 - RNA, 17 nt, Hepatitis B virus
uuauaugcaugcauaca

SEQ ID NO: 1952 - RNA, 17 nt, Hepatitis B virus
augcaugcauacaagca

SEQ ID NO: 1953 - RNA, 17 nt, Hepatitis B virus
gcaugcauacaagcaaa

SEQ ID NO: 1954 - RNA, 17 nt, Hepatitis B virus
caagcaaaacaggcuuu

SEQ ID NO: 1955 - RNA, 17 nt, Hepatitis B virus
aggcuuuuacuuucucg

SEQ ID NO: 1956 - RNA, 17 nt, Hepatitis B virus
ucucgccaacuuacaag

SEQ ID NO: 1957 - RNA, 17 nt, Hepatitis B virus
gccaacuuacaaggccu

SEQ ID NO: 1958 - RNA, 17 nt, Hepatitis B virus
cuaaguaaacaguaugu

SEQ ID NO: 1959 - RNA, 17 nt, Hepatitis B virus
uaaacaguaugugaacc

SEQ ID NO: 1960 - RNA, 17 nt, Hepatitis B virus
guaugugaaccuuuacc

SEQ ID NO: 1961 - RNA, 17 nt, Hepatitis B virus
gaaccuuuaccccguug

SEQ ID NO: 1962 - RNA, 17 nt, Hepatitis B virus
gcucggcaacggccugg

SEQ ID NO: 1963 - RNA, 17 nt, Hepatitis B virus
ccuggucuaugccaagu

SEQ ID NO: 1964 - RNA, 17 nt, Hepatitis B virus
guuugcugacgcaaccc

SEQ ID NO: 1965 - RNA, 17 nt, Hepatitis B virus
cugacgcaacccccacu

SEQ ID NO: 1966 - RNA, 17 nt, Hepatitis B virus
caacccccacugguugg

SEQ ID NO: 1967 - RNA, 17 nt, Hepatitis B virus
gcuuggccauaggccau

SEQ ID NO: 1968 - RNA, 17 nt, Hepatitis B virus
cauaggccaucagcgca

SEQ ID NO: 1969 - RNA, 17 nt, Hepatitis B virus
aucagcgcaugcgugga

SEQ ID NO: 1970 - RNA, 17 nt, Hepatitis B virus
ugcguggaaccuuugug

SEQ ID NO: 1971 - RNA, 17 nt, Hepatitis B virus
cucugccgauccauacc

SEQ ID NO: 1972 - RNA, 17 nt, Hepatitis B virus
gccgauccauaccgcgg

SEQ ID NO: 1973 - RNA, 17 nt, Hepatitis B virus
cgauccauaccgcggaa

SEQ ID NO: 1974 - RNA, 17 nt, Hepatitis B virus
accgcggaacuccuagc

SEQ ID NO: 1975 - RNA, 17 nt, Hepatitis B virus
ggggcaaaacucaucgg

SEQ ID NO: 1976 - RNA, 17 nt, Hepatitis B virus
caaaacucaucgggacu

SEQ ID NO: 1977 - RNA, 17 nt, Hepatitis B virus
ucaucgggacugacaau

SEQ ID NO: 1978 - RNA, 17 nt, Hepatitis B virus
cgggacugacaauucug

SEQ ID NO: 1979 - RNA, 17 nt, Hepatitis B virus
gacugacaauucugucg

SEQ ID NO: 1980 - RNA, 17 nt, Hepatitis B virus
ucccgcaaauauacauc

SEQ ID NO: 1981 - RNA, 17 nt, Hepatitis B virus
ccgcaaauauacaucau

SEQ ID NO: 1982 - RNA, 17 nt, Hepatitis B virus
gcaaauauacaucauuu

SEQ ID NO: 1983 - RNA, 17 nt, Hepatitis B virus
aaauauacaucauuucc

SEQ ID NO: 1984 - RNA, 17 nt, Hepatitis B virus
uauacaucauuuccaug

SEQ ID NO: 1985 - RNA, 17 nt, Hepatitis B virus
ucauuuccauggcugcu

SEQ ID NO: 1986 - RNA, 17 nt, Hepatitis B virus
ugcugccaacuggaucc

SEQ ID NO: 1987 - RNA, 17 nt, Hepatitis B virus
ccaacuggauccuacgc

SEQ ID NO: 1988 - RNA, 17 nt, Hepatitis B virus
uggauccuacgcgggac

SEQ ID NO: 1989 - RNA, 17 nt, Hepatitis B virus
uacgcgggacguccuuu

SEQ ID NO: 1990 - RNA, 17 nt, Hepatitis B virus
cuuuguuuacgucccgu

SEQ ID NO: 1991 - RNA, 17 nt, Hepatitis B virus
ggcgcugaaucccgcgg

SEQ ID NO: 1992 - RNA, 17 nt, Hepatitis B virus
ucccgcggacgaccccu

SEQ ID NO: 1993 - RNA, 17 nt, Hepatitis B virus
cgcggacgaccccuccc

SEQ ID NO: 1994 - RNA, 17 nt, Hepatitis B virus
ggggcucuaccgcccgc

SEQ ID NO: 1995 - RNA, 17 nt, Hepatitis B virus
cuccgccuauuguaccg

SEQ ID NO: 1996 - RNA, 17 nt, Hepatitis B virus
ccuauuguaccgaccgu

SEQ ID NO: 1997 - RNA, 17 nt, Hepatitis B virus
uuguaccgaccguccac

SEQ ID NO: 1998 - RNA, 17 nt, Hepatitis B virus
gaccguccacggggcgc

SEQ ID NO: 1999 - RNA, 17 nt, Hepatitis B virus
cggggcgcaccucucuu

SEQ ID NO: 2000 - RNA, 17 nt, Hepatitis B virus
cucucuuuacgcggacu

SEQ ID NO: 2001 - RNA, 17 nt, Hepatitis B virus
uuacgcggacuccccgu

SEQ ID NO: 2002 - RNA, 17 nt, Hepatitis B virus
gccuucucaucugccgg

SEQ ID NO: 2003 - RNA, 17 nt, Hepatitis B virus
ucugccggaccgugugc

SEQ ID NO: 2004 - RNA, 17 nt, Hepatitis B virus
ccgugugcacuucgcuu

SEQ ID NO: 2005 - RNA, 17 nt, Hepatitis B virus
uucgcuucaccucugca

SEQ ID NO: 2006 - RNA, 17 nt, Hepatitis B virus
accucugcacgucgcau

SEQ ID NO: 2007 - RNA, 17 nt, Hepatitis B virus
cacgucgcauggagacc

SEQ ID NO: 2008 - RNA, 17 nt, Hepatitis B virus
gcauggagaccaccgug

SEQ ID NO: 2009 - RNA, 17 nt, Hepatitis B virus
uggagaccaccgugaac

SEQ ID NO: 2010 - RNA, 17 nt, Hepatitis B virus
caccgugaacgcccaca

SEQ ID NO: 2011 - RNA, 17 nt, Hepatitis B virus
ccacaggaaccugccca

SEQ ID NO: 2012 - RNA, 17 nt, Hepatitis B virus
ggucuugcauaagagga

SEQ ID NO: 2013 - RNA, 17 nt, Hepatitis B virus
auaagaggacucuugga

SEQ ID NO: 2014 - RNA, 17 nt, Hepatitis B virus
acucuuggacuuucagc

SEQ ID NO: 2015 - RNA, 17 nt, Hepatitis B virus
uuucagcaaugucaacg

SEQ ID NO: 2016 - RNA, 17 nt, Hepatitis B virus
caaugucaacgaccgac

SEQ ID NO: 2017 - RNA, 17 nt, Hepatitis B virus
ugucaacgaccgaccuu

SEQ ID NO: 2018 - RNA, 17 nt, Hepatitis B virus
aacgaccgaccuugagg

SEQ ID NO: 2019 - RNA, 17 nt, Hepatitis B virus
cuugaggcauacuucaa

SEQ ID NO: 2020 - RNA, 17 nt, Hepatitis B virus
ugaggcauacuucaaag

SEQ ID NO: 2021 - RNA, 17 nt, Hepatitis B virus
cuucaaagacugugugu

SEQ ID NO: 2022 - RNA, 17 nt, Hepatitis B virus
uguguuuaaugaguggg

SEQ ID NO: 2023 - RNA, 17 nt, Hepatitis B virus
gucuuuguacuaggagg

SEQ ID NO: 2024 - RNA, 17 nt, Hepatitis B virus
cuguaggcauaaauugg

SEQ ID NO: 2025 - RNA, 17 nt, Hepatitis B virus
aggcauaaauuggugug

SEQ ID NO: 2026 - RNA, 17 nt, Hepatitis B virus
guguguucaccagcacc

SEQ ID NO: 2027 - RNA, 17 nt, Hepatitis B virus
ucaccagcaccaugcaa

SEQ ID NO: 2028 - RNA, 17 nt, Hepatitis B virus
ccagcaccaugcaacuu

SEQ ID NO: 2029 - RNA, 17 nt, Hepatitis B virus
accaugcaacuuuuuca

SEQ ID NO: 2030 - RNA, 17 nt, Hepatitis B virus
acuuuuucaccucugcc

SEQ ID NO: 2031 - RNA, 17 nt, Hepatitis B virus
ucugccuaaucaucuca

SEQ ID NO: 2032 - RNA, 17 nt, Hepatitis B virus
gccuaaucaucucaugu

SEQ ID NO: 2033 - RNA, 17 nt, Hepatitis B virus
aucaucucauguucaug

SEQ ID NO: 2034 - RNA, 17 nt, Hepatitis B virus
ucauguucauguccuac

SEQ ID NO: 2035 - RNA, 17 nt, Hepatitis B virus
cauguccuacuguucaa

SEQ ID NO: 2036 - RNA, 17 nt, Hepatitis B virus
uuuggggcauggacauu

SEQ ID NO: 2037 - RNA, 17 nt, Hepatitis B virus
gggcauggacauugacc

SEQ ID NO: 2038 - RNA, 17 nt, Hepatitis B virus
gcauggacauugacccg

SEQ ID NO: 2039 - RNA, 17 nt, Hepatitis B virus
ggacauugacccguaua

SEQ ID NO: 2040 - RNA, 17 nt, Hepatitis B virus
ugacccguauaaagaau

SEQ ID NO: 2041 - RNA, 17 nt, Hepatitis B virus
uauaaagaauuuggagc

SEQ ID NO: 2042 - RNA, 17 nt, Hepatitis B virus
guggaguuacucucuuu

SEQ ID NO: 2043 - RNA, 17 nt, Hepatitis B virus
gccuucugacuucuuuc

SEQ ID NO: 2044 - RNA, 17 nt, Hepatitis B virus
uuccuucuauucgagau

SEQ ID NO: 2045 - RNA, 17 nt, Hepatitis B virus
uauucgagaucuccucg

SEQ ID NO: 2046 - RNA, 17 nt, Hepatitis B virus
ucuccucgacaccgccu

SEQ ID NO: 2047 - RNA, 17 nt, Hepatitis B virus
uccucgacaccgccucu

SEQ ID NO: 2048 - RNA, 17 nt, Hepatitis B virus
ugcucuguaucgggggg

SEQ ID NO: 2049 - RNA, 17 nt, Hepatitis B virus
ucuccggaacauuguuc

SEQ ID NO: 2050 - RNA, 17 nt, Hepatitis B virus
uccggaacauuguucac

SEQ ID NO: 2051 - RNA, 17 nt, Hepatitis B virus
cauuguucaccucacca

SEQ ID NO: 2052 - RNA, 17 nt, Hepatitis B virus
uucaccucaccauacgg

SEQ ID NO: 2053 - RNA, 17 nt, Hepatitis B virus
accucaccauacggcac

SEQ ID NO: 2054 - RNA, 17 nt, Hepatitis B virus
cucaccauacggcacuc

SEQ ID NO: 2055 - RNA, 17 nt, Hepatitis B virus
cauacggcacucaggca

SEQ ID NO: 2056 - RNA, 17 nt, Hepatitis B virus
ggcaagcuauucugugu

SEQ ID NO: 2057 - RNA, 17 nt, Hepatitis B virus
gugaguugaugaaucua

SEQ ID NO: 2058 - RNA, 17 nt, Hepatitis B virus
guugaugaaucuagcca

SEQ ID NO: 2059 - RNA, 17 nt, Hepatitis B virus
aucuagccaccugggug

SEQ ID NO: 2060 - RNA, 17 nt, Hepatitis B virus
gggaaguaauuuggaag

SEQ ID NO: 2061 - RNA, 17 nt, Hepatitis B virus
uuuggaagauccagcau

SEQ ID NO: 2062 - RNA, 17 nt, Hepatitis B virus
gauccagcauccaggga

SEQ ID NO: 2063 - RNA, 17 nt, Hepatitis B virus
uccagggaauuaguagu

SEQ ID NO: 2064 - RNA, 17 nt, Hepatitis B virus
agucagcuaugucaacg

SEQ ID NO: 2065 - RNA, 17 nt, Hepatitis B virus
cuaugucaacguuaaua

SEQ ID NO: 2066 - RNA, 17 nt, Hepatitis B virus
caacguuaauaugggcc

SEQ ID NO: 2067 - RNA, 17 nt, Hepatitis B virus
acguuaauaugggccua

SEQ ID NO: 2068 - RNA, 17 nt, Hepatitis B virus
gccuaaaaaucagacaa

SEQ ID NO: 2069 - RNA, 17 nt, Hepatitis B virus
aaaaucagacaacuauu

SEQ ID NO: 2070 - RNA, 17 nt, Hepatitis B virus
aucagacaacuauugug

SEQ ID NO: 2071 - RNA, 17 nt, Hepatitis B virus
agacaacuauugugguu

SEQ ID NO: 2072 - RNA, 17 nt, Hepatitis B virus
gugguuucacauuuccu

SEQ ID NO: 2073 - RNA, 17 nt, Hepatitis B virus
gguuucacauuuccugu

SEQ ID NO: 2074 - RNA, 17 nt, Hepatitis B virus
ccugucuuacuuuuggg

SEQ ID NO: 2075 - RNA, 17 nt, Hepatitis B virus
ggcgagaaacuguucuu

SEQ ID NO: 2076 - RNA, 17 nt, Hepatitis B virus
guucuugaauauuuggu

SEQ ID NO: 2077 - RNA, 17 nt, Hepatitis B virus
ucuugaauauuuggugu

SEQ ID NO: 2078 - RNA, 17 nt, Hepatitis B virus
gaguguggauucgcacu

SEQ ID NO: 2079 - RNA, 17 nt, Hepatitis B virus
ggauucgcacuccuccu

SEQ ID NO: 2080 - RNA, 17 nt, Hepatitis B virus
ccuccugcauauagacc

SEQ ID NO: 2081 - RNA, 17 nt, Hepatitis B virus
uccugcauauagaccac

SEQ ID NO: 2082 - RNA, 17 nt, Hepatitis B virus
gcauauagaccaccaaa

SEQ ID NO: 2083 - RNA, 17 nt, Hepatitis B virus
uauagaccaccaaaugc

SEQ ID NO: 2084 - RNA, 17 nt, Hepatitis B virus
accaccaaaugccccua

SEQ ID NO: 2085 - RNA, 17 nt, Hepatitis B virus
augccccuaucuuauca

SEQ ID NO: 2086 - RNA, 17 nt, Hepatitis B virus
ccuaucuuaucaacacu

SEQ ID NO: 2087 - RNA, 17 nt, Hepatitis B virus
ucuuaucaacacuuccg

SEQ ID NO: 2088 - RNA, 17 nt, Hepatitis B virus
uuaucaacacuuccgga

SEQ ID NO: 2089 - RNA, 17 nt, Hepatitis B virus
uuccggaaacuacuguu

SEQ ID NO: 2090 - RNA, 17 nt, Hepatitis B virus
cggaaacuacuguuguu

SEQ ID NO: 2091 - RNA, 17 nt, Hepatitis B virus
guuguuagacgaagagg

SEQ ID NO: 2092 - RNA, 17 nt, Hepatitis B virus
gaagaagaacucccucg

SEQ ID NO: 2093 - RNA, 17 nt, Hepatitis B virus
ccucgcagacgaagguc

SEQ ID NO: 2094 - RNA, 17 nt, Hepatitis B virus
aggucucaaucgccgcg

SEQ ID NO: 2095 - RNA, 17 nt, Hepatitis B virus
cgcagaagaucucaauc

SEQ ID NO: 2096 - RNA, 17 nt, Hepatitis B virus
agaucucaaucucggga

SEQ ID NO: 2097 - RNA, 17 nt, Hepatitis B virus
ucucgggaaucucaaug

SEQ ID NO: 2098 - RNA, 17 nt, Hepatitis B virus
gaaucucaauguuagua

SEQ ID NO: 2099 - RNA, 17 nt, Hepatitis B virus
auguuaguauuccuugg

SEQ ID NO: 2100 - RNA, 17 nt, Hepatitis B virus
uuccuuggacacauaag

SEQ ID NO: 2101 - RNA, 17 nt, Hepatitis B virus
ccuuggacacauaaggu

SEQ ID NO: 2102 - RNA, 17 nt, Hepatitis B virus
uuggacacauaaggugg

SEQ ID NO: 2103 - RNA, 17 nt, Hepatitis B virus
ggugggaaacuuuacgg

SEQ ID NO: 2104 - RNA, 17 nt, Hepatitis B virus
gaaacuuuacggggcuu

SEQ ID NO: 2105 - RNA, 17 nt, Hepatitis B virus
ggggcuuuauucuucua

SEQ ID NO: 2106 - RNA, 17 nt, Hepatitis B virus
auucuucuacgguaccu

SEQ ID NO: 2107 - RNA, 17 nt, Hepatitis B virus
ucuacgguaccuugcuu

SEQ ID NO: 2108 - RNA, 17 nt, Hepatitis B virus
uugcuuuaauccuaaau

SEQ ID NO: 2109 - RNA, 17 nt, Hepatitis B virus
aauccuaaauggcaaac

SEQ ID NO: 2110 - RNA, 17 nt, Hepatitis B virus
aauggcaaacuccuucu

SEQ ID NO: 2111 - RNA, 17 nt, Hepatitis B virus
uuuuccugacauucauu

SEQ ID NO: 2112 - RNA, 17 nt, Hepatitis B virus
uuccugacauucauuug

SEQ ID NO: 2113 - RNA, 17 nt, Hepatitis B virus
ugacauucauuugcagg

SEQ ID NO: 2114 - RNA, 17 nt, Hepatitis B virus
gcaggaggacauuguug

SEQ ID NO: 2115 - RNA, 17 nt, Hepatitis B virus
aggaggacauuguugau

SEQ ID NO: 2116 - RNA, 17 nt, Hepatitis B virus
cauuguugauagaugua

SEQ ID NO: 2117 - RNA, 17 nt, Hepatitis B virus
guugauagauguaagca

SEQ ID NO: 2118 - RNA, 17 nt, Hepatitis B virus
uguaagcaauuuguggg

SEQ ID NO: 2119 - RNA, 17 nt, Hepatitis B virus
ggccccuuacaguaaau

SEQ ID NO: 2120 - RNA, 17 nt, Hepatitis B virus
uacaguaaaugaaaaca

SEQ ID NO: 2121 - RNA, 17 nt, Hepatitis B virus
aaaugaaaacaggagac

SEQ ID NO: 2122 - RNA, 17 nt, Hepatitis B virus
aacaggagacuuaaauu

SEQ ID NO: 2123 - RNA, 17 nt, Hepatitis B virus
agacuuaaauuaacuau

SEQ ID NO: 2124 - RNA, 17 nt, Hepatitis B virus
uuaaauuaacuaugccu

SEQ ID NO: 2125 - RNA, 17 nt, Hepatitis B virus
aauuaacuaugccugcu

SEQ ID NO: 2126 - RNA, 17 nt, Hepatitis B virus
uagguuuuaucccaaug

SEQ ID NO: 2127 - RNA, 17 nt, Hepatitis B virus
uuaucccaauguuacua

SEQ ID NO: 2128 - RNA, 17 nt, Hepatitis B virus
ccaauguuacuaaauau

SEQ ID NO: 2129 - RNA, 17 nt, Hepatitis B virus
guuacuaaauauuugcc

SEQ ID NO: 2130 - RNA, 17 nt, Hepatitis B virus
uacuaaauauuugcccu

SEQ ID NO: 2131 - RNA, 17 nt, Hepatitis B virus
gcccuuagauaaaggga

SEQ ID NO: 2132 - RNA, 17 nt, Hepatitis B virus
auaaagggaucaaaccg

SEQ ID NO: 2133 - RNA, 17 nt, Hepatitis B virus
gggaucaaaccguauua

SEQ ID NO: 2134 - RNA, 17 nt, Hepatitis B virus
caaaccguauuauccag

SEQ ID NO: 2135 - RNA, 17 nt, Hepatitis B virus
accguauuauccagagu

SEQ ID NO: 2136 - RNA, 17 nt, Hepatitis B virus
uccagaguauguaguua

SEQ ID NO: 2137 - RNA, 17 nt, Hepatitis B virus
uguaguuaaucauuacu

SEQ ID NO: 2138 - RNA, 17 nt, Hepatitis B virus
aguuaaucauuacuucc

SEQ ID NO: 2139 - RNA, 17 nt, Hepatitis B virus
uaaucauuacuuccaga

SEQ ID NO: 2140 - RNA, 17 nt, Hepatitis B virus
acuuccagacgcgacau

SEQ ID NO: 2141 - RNA, 17 nt, Hepatitis B virus
cagacgcgacauuauuu

SEQ ID NO: 2142 - RNA, 17 nt, Hepatitis B virus
gacgcgacauuauuuac

SEQ ID NO: 2143 - RNA, 17 nt, Hepatitis B virus
gcgacauuauuuacaca

SEQ ID NO: 2144 - RNA, 17 nt, Hepatitis B virus
cauuauuuacacacucu

SEQ ID NO: 2145 - RNA, 17 nt, Hepatitis B virus
uuauuuacacacucuuu

SEQ ID NO: 2146 - RNA, 17 nt, Hepatitis B virus
auuuacacacucuuugg

SEQ ID NO: 2147 - RNA, 17 nt, Hepatitis B virus
aggcggggaucuuauau

SEQ ID NO: 2148 - RNA, 17 nt, Hepatitis B virus
gggaucuuauauaaaag

SEQ ID NO: 2149 - RNA, 17 nt, Hepatitis B virus
gaucuuauauaaaagag

SEQ ID NO: 2150 - RNA, 17 nt, Hepatitis B virus
gagaguccacacguagc

SEQ ID NO: 2151 - RNA, 17 nt, Hepatitis B virus
gaguccacacguagcgc

SEQ ID NO: 2152 - RNA, 17 nt, Hepatitis B virus
agcgccucauuuugcgg

SEQ ID NO: 2153 - RNA, 17 nt, Hepatitis B virus
ugcgggucaccauauuc

SEQ ID NO: 2154 - RNA, 17 nt, Hepatitis B virus
gggucaccauauucuug

SEQ ID NO: 2155 - RNA, 17 nt, Hepatitis B virus
gucaccauauucuuggg

SEQ ID NO: 2156 - RNA, 17 nt, Hepatitis B virus
ucuugggaacaagaucu

SEQ ID NO: 2157 - RNA, 17 nt, Hepatitis B virus
ggaacaagaucuacagc

SEQ ID NO: 2158 - RNA, 17 nt, Hepatitis B virus
caagaucuacagcaugg

SEQ ID NO: 2159 - RNA, 17 nt, Hepatitis B virus
ucuacagcaugggaggu

SEQ ID NO: 2160 - RNA, 17 nt, Hepatitis B virus
ucuuccaaaccucgaaa

SEQ ID NO: 2161 - RNA, 17 nt, Hepatitis B virus
gaaaaggcauggggaca

SEQ ID NO: 2162 - RNA, 17 nt, Hepatitis B virus
gcauggggacaaaucuu

SEQ ID NO: 2163 - RNA, 17 nt, Hepatitis B virus
ggggacaaaucuuucug

SEQ ID NO: 2164 - RNA, 17 nt, Hepatitis B virus
uguccccaauccccugg

SEQ ID NO: 2165 - RNA, 17 nt, Hepatitis B virus
ccccugggauucuuccc

SEQ ID NO: 2166 - RNA, 17 nt, Hepatitis B virus
cuuccccgaucaucagu

SEQ ID NO: 2167 - RNA, 17 nt, Hepatitis B virus
ccccgaucaucaguugg

SEQ ID NO: 2168 - RNA, 17 nt, Hepatitis B virus
ucaguuggacccugcau

SEQ ID NO: 2169 - RNA, 17 nt, Hepatitis B virus
gacccugcauucaaagc

SEQ ID NO: 2170 - RNA, 17 nt, Hepatitis B virus
caaagccaacucaguaa

SEQ ID NO: 2171 - RNA, 17 nt, Hepatitis B virus
cucaguaaauccagauu

SEQ ID NO: 2172 - RNA, 17 nt, Hepatitis B virus
aaauccagauugggacc

SEQ ID NO: 2173 - RNA, 17 nt, Hepatitis B virus
agauugggaccucaacc

SEQ ID NO: 2174 - RNA, 17 nt, Hepatitis B virus
ggaccucaacccgcaca

SEQ ID NO: 2175 - RNA, 17 nt, Hepatitis B virus
gcacaaggacaacuggc

SEQ ID NO: 2176 - RNA, 17 nt, Hepatitis B virus
caaggacaacuggccgg

SEQ ID NO: 2177 - RNA, 17 nt, Hepatitis B virus
cuggccggacgccaaca

SEQ ID NO: 2178 - RNA, 17 nt, Hepatitis B virus
ggacgccaacaaggugg

SEQ ID NO: 2179 - RNA, 17 nt, Hepatitis B virus
gugggagcauucgggcc

SEQ ID NO: 2180 - RNA, 17 nt, Hepatitis B virus
caggguucaccccuccc

SEQ ID NO: 2181 - RNA, 17 nt, Hepatitis B virus
cccuccccaugggggac

SEQ ID NO: 2182 - RNA, 17 nt, Hepatitis B virus
caugggggacuguuggg

SEQ ID NO: 2183 - RNA, 17 nt, Hepatitis B virus
gagcccucacgcucagg

SEQ ID NO: 2184 - RNA, 17 nt, Hepatitis B virus
cagggccuacucacaac

SEQ ID NO: 2185 - RNA, 17 nt, Hepatitis B virus
gccuacucacaacugug

SEQ ID NO: 2186 - RNA, 17 nt, Hepatitis B virus
uacucacaacugugcca

SEQ ID NO: 2187 - RNA, 17 nt, Hepatitis B virus
cugccuccaccaaucgg

SEQ ID NO: 2188 - RNA, 17 nt, Hepatitis B virus
cuccaccaaucggcagu

SEQ ID NO: 2189 - RNA, 17 nt, Hepatitis B virus
ggcagccuacucccuua

SEQ ID NO: 2190 - RNA, 17 nt, Hepatitis B virus
acucccuuaucuccacc

SEQ ID NO: 2191 - RNA, 17 nt, Hepatitis B virus
uuaucuccaccucuaag

SEQ ID NO: 2192 - RNA, 17 nt, Hepatitis B virus
ucuaagggacacucauc

SEQ ID NO: 2193 - RNA, 17 nt, Hepatitis B virus
uaagggacacucauccu

SEQ ID NO: 2194 - RNA, 17 nt, Hepatitis B virus
ggacacucauccucagg

SEQ ID NO: 2195 - RNA, 17 nt, Hepatitis B virus
cucaggccaugcagugg

SEQ ID NO: 2196 - RNA, 17 nt, Hepatitis B virus
cucuucaagaucccaga

SEQ ID NO: 2197 - RNA, 17 nt, Hepatitis B virus
agaucccagagucaggg

SEQ ID NO: 2198 - RNA, 17 nt, Hepatitis B virus
cagagucagggcccugu

SEQ ID NO: 2199 - RNA, 17 nt, Hepatitis B virus
agagucagggcccugua

SEQ ID NO: 2200 - RNA, 17 nt, Hepatitis B virus
uuccugcugguggcucc

SEQ ID NO: 2201 - RNA, 17 nt, Hepatitis B virus
cugcugguggcuccagu

SEQ ID NO: 2202 - RNA, 17 nt, Hepatitis B virus
ccaguucaggaacagug

SEQ ID NO: 2203 - RNA, 17 nt, Hepatitis B virus
caguucaggaacaguga

SEQ ID NO: 2204 - RNA, 17 nt, Hepatitis B virus
ccugcucagaauacugu

SEQ ID NO: 2205 - RNA, 17 nt, Hepatitis B virus
uuaucgaagacugggga

SEQ ID NO: 2206 - RNA, 17 nt, Hepatitis B virus
cgaagacuggggacccu

SEQ ID NO: 2207 - RNA, 17 nt, Hepatitis B virus
gaagacuggggacccug

SEQ ID NO: 2208 - RNA, 17 nt, Hepatitis B virus
aagacuggggacccugu

SEQ ID NO: 2209 - RNA, 17 nt, Hepatitis B virus
agacuggggacccugua

SEQ ID NO: 2210 - RNA, 17 nt, Hepatitis B virus
ccgaacauggagaacau

SEQ ID NO: 2211 - RNA, 17 nt, Hepatitis B virus
cgaacauggagaacauc

SEQ ID NO: 2212 - RNA, 17 nt, Hepatitis B virus
aacauggagaacaucgc

SEQ ID NO: 2213 - RNA, 17 nt, Hepatitis B virus
ucgcaucaggacuccua

SEQ ID NO: 2214 - RNA, 17 nt, Hepatitis B virus
cgcaucaggacuccuag

SEQ ID NO: 2215 - RNA, 17 nt, Hepatitis B virus
gacuccuaggaccccug

SEQ ID NO: 2216 - RNA, 17 nt, Hepatitis B virus
acuccuaggaccccugc

SEQ ID NO: 2217 - RNA, 17 nt, Hepatitis B virus
guguuacaggcgggguu

SEQ ID NO: 2218 - RNA, 17 nt, Hepatitis B virus
uuacaggcgggguuuuu

SEQ ID NO: 2219 - RNA, 17 nt, Hepatitis B virus
uacaggcgggguuuuuc

SEQ ID NO: 2220 - RNA, 17 nt, Hepatitis B virus
acaggcgggguuuuucu

SEQ ID NO: 2221 - RNA, 17 nt, Hepatitis B virus
auaccacagagucuaga

SEQ ID NO: 2222 - RNA, 17 nt, Hepatitis B virus
agagucuagacucgugg

SEQ ID NO: 2223 - RNA, 17 nt, Hepatitis B virus
agacucgugguggacuu

SEQ ID NO: 2224 - RNA, 17 nt, Hepatitis B virus
cucgugguggacuucuc

SEQ ID NO: 2225 - RNA, 17 nt, Hepatitis B virus
ucgugguggacuucucu

SEQ ID NO: 2226 - RNA, 17 nt, Hepatitis B virus
auuuucuagggggaaca

SEQ ID NO: 2227 - RNA, 17 nt, Hepatitis B virus
uuuucuagggggaacac

SEQ ID NO: 2228 - RNA, 17 nt, Hepatitis B virus
uuucuagggggaacacc

SEQ ID NO: 2229 - RNA, 17 nt, Hepatitis B virus
uucuagggggaacaccc

SEQ ID NO: 2230 - RNA, 17 nt, Hepatitis B virus
ucuagggggaacacccg

SEQ ID NO: 2231 - RNA, 17 nt, Hepatitis B virus
ugugucuuggccaaaau

SEQ ID NO: 2232 - RNA, 17 nt, Hepatitis B virus
uuuguccugguuaucgc

SEQ ID NO: 2233 - RNA, 17 nt, Hepatitis B virus
uuaucgcuggauguguc

SEQ ID NO: 2234 - RNA, 17 nt, Hepatitis B virus
uaucgcuggaugugucu

SEQ ID NO: 2235 - RNA, 17 nt, Hepatitis B virus
gugucugcggcguuuua

SEQ ID NO: 2236 - RNA, 17 nt, Hepatitis B virus
uucuuguugguucuucu

SEQ ID NO: 2237 - RNA, 17 nt, Hepatitis B virus
guucuucuggacuauca

SEQ ID NO: 2238 - RNA, 17 nt, Hepatitis B virus
uucuucuggacuaucaa

SEQ ID NO: 2239 - RNA, 17 nt, Hepatitis B virus
acuaucaagguauguug

SEQ ID NO: 2240 - RNA, 17 nt, Hepatitis B virus
uaauuccaggaucauca

SEQ ID NO: 2241 - RNA, 17 nt, Hepatitis B virus
aauuccaggaucaucaa

SEQ ID NO: 2242 - RNA, 17 nt, Hepatitis B virus
ccagcaccggaccaugc

SEQ ID NO: 2243 - RNA, 17 nt, Hepatitis B virus
cagcaccggaccaugca

SEQ ID NO: 2244 - RNA, 17 nt, Hepatitis B virus
cugcucaaggaaccucu

SEQ ID NO: 2245 - RNA, 17 nt, Hepatitis B virus
ugcucaaggaaccucua

SEQ ID NO: 2246 - RNA, 17 nt, Hepatitis B virus
aaaccuacggacggaaa

SEQ ID NO: 2247 - RNA, 17 nt, Hepatitis B virus
aaccuacggacggaaac

SEQ ID NO: 2248 - RNA, 17 nt, Hepatitis B virus
cuacggacggaaacugc

SEQ ID NO: 2249 - RNA, 17 nt, Hepatitis B virus
uacggacggaaacugca

SEQ ID NO: 2250 - RNA, 17 nt, Hepatitis B virus
aucaucuugggcuuucg

SEQ ID NO: 2251 - RNA, 17 nt, Hepatitis B virus
ucaucuugggcuuucgc

SEQ ID NO: 2252 - RNA, 17 nt, Hepatitis B virus
auaccuaugggaguggg

SEQ ID NO: 2253 - RNA, 17 nt, Hepatitis B virus
uaccuaugggagugggc

SEQ ID NO: 2254 - RNA, 17 nt, Hepatitis B virus
accuaugggagugggcc

SEQ ID NO: 2255 - RNA, 17 nt, Hepatitis B virus
augggagugggccucag

SEQ ID NO: 2256 - RNA, 17 nt, Hepatitis B virus
ugggagugggccucagu

SEQ ID NO: 2257 - RNA, 17 nt, Hepatitis B virus
uuucucuuggcucaguu

SEQ ID NO: 2258 - RNA, 17 nt, Hepatitis B virus
uguucagugguucguag

SEQ ID NO: 2259 - RNA, 17 nt, Hepatitis B virus
gguucguagggcuuucc

SEQ ID NO: 2260 - RNA, 17 nt, Hepatitis B virus
guucguagggcuuuccc

SEQ ID NO: 2261 - RNA, 17 nt, Hepatitis B virus
cacugucuggcuuucag

SEQ ID NO: 2262 - RNA, 17 nt, Hepatitis B virus
aguuauauggaugaugu

SEQ ID NO: 2263 - RNA, 17 nt, Hepatitis B virus
guuauauggaugaugug

SEQ ID NO: 2264 - RNA, 17 nt, Hepatitis B virus
gaugaugugguuuuggg

SEQ ID NO: 2265 - RNA, 17 nt, Hepatitis B virus
gugguuuugggggccaa

SEQ ID NO: 2266 - RNA, 17 nt, Hepatitis B virus
ugguuuugggggccaag

SEQ ID NO: 2267 - RNA, 17 nt, Hepatitis B virus
gguuuugggggccaagu

SEQ ID NO: 2268 - RNA, 17 nt, Hepatitis B virus
guuuugggggccaaguc

SEQ ID NO: 2269 - RNA, 17 nt, Hepatitis B virus
uugucuuuggguauaca

SEQ ID NO: 2270 - RNA, 17 nt, Hepatitis B virus
ugucuuuggguauacau

SEQ ID NO: 2271 - RNA, 17 nt, Hepatitis B virus
aacaaaaagauggggau

SEQ ID NO: 2272 - RNA, 17 nt, Hepatitis B virus
aaaaagauggggauauu

SEQ ID NO: 2273 - RNA, 17 nt, Hepatitis B virus
aaaagauggggauauuc

SEQ ID NO: 2274 - RNA, 17 nt, Hepatitis B virus
aaagauggggauauucc

SEQ ID NO: 2275 - RNA, 17 nt, Hepatitis B virus
aagauggggauauuccc

SEQ ID NO: 2276 - RNA, 17 nt, Hepatitis B virus
aacuucaugggauaugu

SEQ ID NO: 2277 - RNA, 17 nt, Hepatitis B virus
acuucaugggauaugua

SEQ ID NO: 2278 - RNA, 17 nt, Hepatitis B virus
cuucaugggauauguaa

SEQ ID NO: 2279 - RNA, 17 nt, Hepatitis B virus
auguaauugggaguugg

SEQ ID NO: 2280 - RNA, 17 nt, Hepatitis B virus
uguaauugggaguuggg

SEQ ID NO: 2281 - RNA, 17 nt, Hepatitis B virus
guaauugggaguugggg

SEQ ID NO: 2282 - RNA, 17 nt, Hepatitis B virus
ugggaguuggggcacau

SEQ ID NO: 2283 - RNA, 17 nt, Hepatitis B virus
gggaguuggggcacauu

SEQ ID NO: 2284 - RNA, 17 nt, Hepatitis B virus
ggaguuggggcacauug

SEQ ID NO: 2285 - RNA, 17 nt, Hepatitis B virus
uugccacaggaacauau

SEQ ID NO: 2286 - RNA, 17 nt, Hepatitis B virus
ugccacaggaacauauu

SEQ ID NO: 2287 - RNA, 17 nt, Hepatitis B virus
guguuuuaggaaacuuc

SEQ ID NO: 2288 - RNA, 17 nt, Hepatitis B virus
uguuuuaggaaacuucc

SEQ ID NO: 2289 - RNA, 17 nt, Hepatitis B virus
uguaaacaggccuauug

SEQ ID NO: 2290 - RNA, 17 nt, Hepatitis B virus
uauugauuggaaaguau

SEQ ID NO: 2291 - RNA, 17 nt, Hepatitis B virus
auugauuggaaaguaug

SEQ ID NO: 2292 - RNA, 17 nt, Hepatitis B virus
cgaauugugggucuuuu

SEQ ID NO: 2293 - RNA, 17 nt, Hepatitis B virus
gaauugugggucuuuug

SEQ ID NO: 2294 - RNA, 17 nt, Hepatitis B virus
ggucuuuugggguuugc

SEQ ID NO: 2295 - RNA, 17 nt, Hepatitis B virus
gucuuuugggguuugcc

SEQ ID NO: 2296 - RNA, 17 nt, Hepatitis B virus
ucuuuugggguuugccg

SEQ ID NO: 2297 - RNA, 17 nt, Hepatitis B virus
cgcaauguggauauucu

SEQ ID NO: 2298 - RNA, 17 nt, Hepatitis B virus
gcaauguggauauucug

SEQ ID NO: 2299 - RNA, 17 nt, Hepatitis B virus
gcaaaacaggcuuuuac

SEQ ID NO: 2300 - RNA, 17 nt, Hepatitis B virus
acuuacaaggccuuucu

SEQ ID NO: 2301 - RNA, 17 nt, Hepatitis B virus
cguugcucggcaacggc

SEQ ID NO: 2302 - RNA, 17 nt, Hepatitis B virus
ucggcaacggccugguc

SEQ ID NO: 2303 - RNA, 17 nt, Hepatitis B virus
aacggccuggucuaugc

SEQ ID NO: 2304 - RNA, 17 nt, Hepatitis B virus
cccccacugguuggggc

SEQ ID NO: 2305 - RNA, 17 nt, Hepatitis B virus
cacugguuggggcuugg

SEQ ID NO: 2306 - RNA, 17 nt, Hepatitis B virus
acugguuggggcuuggc

SEQ ID NO: 2307 - RNA, 17 nt, Hepatitis B virus
cugguuggggcuuggcc

SEQ ID NO: 2308 - RNA, 17 nt, Hepatitis B virus
uggggcuuggccauagg

SEQ ID NO: 2309 - RNA, 17 nt, Hepatitis B virus
uggccauaggccaucag

SEQ ID NO: 2310 - RNA, 17 nt, Hepatitis B virus
gcaugcguggaaccuuu

SEQ ID NO: 2311 - RNA, 17 nt, Hepatitis B virus
caugcguggaaccuuug

SEQ ID NO: 2312 - RNA, 17 nt, Hepatitis B virus
cauaccgcggaacuccu

SEQ ID NO: 2313 - RNA, 17 nt, Hepatitis B virus
auaccgcggaacuccua

SEQ ID NO: 2314 - RNA, 17 nt, Hepatitis B virus
ucgcagcaggucugggg

SEQ ID NO: 2315 - RNA, 17 nt, Hepatitis B virus
gcaggucuggggcaaaa

SEQ ID NO: 2316 - RNA, 17 nt, Hepatitis B virus
caggucuggggcaaaac

SEQ ID NO: 2317 - RNA, 17 nt, Hepatitis B virus
aggucuggggcaaaacu

SEQ ID NO: 2318 - RNA, 17 nt, Hepatitis B virus
aacucaucgggacugac

SEQ ID NO: 2319 - RNA, 17 nt, Hepatitis B virus
acucaucgggacugaca

SEQ ID NO: 2320 - RNA, 17 nt, Hepatitis B virus
cucaucgggacugacaa

SEQ ID NO: 2321 - RNA, 17 nt, Hepatitis B virus
auuuccauggcugcuag

SEQ ID NO: 2322 - RNA, 17 nt, Hepatitis B virus
ggcugcuaggcugugcu

SEQ ID NO: 2323 - RNA, 17 nt, Hepatitis B virus
ugccaacuggauccuac

SEQ ID NO: 2324 - RNA, 17 nt, Hepatitis B virus
gccaacuggauccuacg

SEQ ID NO: 2325 - RNA, 17 nt, Hepatitis B virus
uccuacgcgggacgucc

SEQ ID NO: 2326 - RNA, 17 nt, Hepatitis B virus
ccuacgcgggacguccu

SEQ ID NO: 2327 - RNA, 17 nt, Hepatitis B virus
cuacgcgggacguccuu

SEQ ID NO: 2328 - RNA, 17 nt, Hepatitis B virus
gucccgucggcgcugaa

SEQ ID NO: 2329 - RNA, 17 nt, Hepatitis B virus
aaucccgcggacgaccc

SEQ ID NO: 2330 - RNA, 17 nt, Hepatitis B virus
aucccgcggacgacccc

SEQ ID NO: 2331 - RNA, 17 nt, Hepatitis B virus
ccccucccggggccgcu

SEQ ID NO: 2332 - RNA, 17 nt, Hepatitis B virus
cccucccggggccgcuu

SEQ ID NO: 2333 - RNA, 17 nt, Hepatitis B virus
ccucccggggccgcuug

SEQ ID NO: 2334 - RNA, 17 nt, Hepatitis B virus
ggccgcuuggggcucua

SEQ ID NO: 2335 - RNA, 17 nt, Hepatitis B virus
gccgcuuggggcucuac

SEQ ID NO: 2336 - RNA, 17 nt, Hepatitis B virus
ccgcuuggggcucuacc

SEQ ID NO: 2337 - RNA, 17 nt, Hepatitis B virus
ccguccacggggcgcac

SEQ ID NO: 2338 - RNA, 17 nt, Hepatitis B virus
cguccacggggcgcacc

SEQ ID NO: 2339 - RNA, 17 nt, Hepatitis B virus
guccacggggcgcaccu

SEQ ID NO: 2340 - RNA, 17 nt, Hepatitis B virus
cuuuacgcggacucccc

SEQ ID NO: 2341 - RNA, 17 nt, Hepatitis B virus
uuuacgcggacuccccg

SEQ ID NO: 2342 - RNA, 17 nt, Hepatitis B virus
caucugccggaccgugu

SEQ ID NO: 2343 - RNA, 17 nt, Hepatitis B virus
aucugccggaccgugug

SEQ ID NO: 2344 - RNA, 17 nt, Hepatitis B virus
cgucgcauggagaccac

SEQ ID NO: 2345 - RNA, 17 nt, Hepatitis B virus
gucgcauggagaccacc

SEQ ID NO: 2346 - RNA, 17 nt, Hepatitis B virus
cgcauggagaccaccgu

SEQ ID NO: 2347 - RNA, 17 nt, Hepatitis B virus
cgcccacaggaaccugc

SEQ ID NO: 2348 - RNA, 17 nt, Hepatitis B virus
gcccacaggaaccugcc

SEQ ID NO: 2349 - RNA, 17 nt, Hepatitis B virus
cugcccaaggucuugca

SEQ ID NO: 2350 - RNA, 17 nt, Hepatitis B virus
uugcauaagaggacucu

SEQ ID NO: 2351 - RNA, 17 nt, Hepatitis B virus
gcauaagaggacucuug

SEQ ID NO: 2352 - RNA, 17 nt, Hepatitis B virus
cauaagaggacucuugg

SEQ ID NO: 2353 - RNA, 17 nt, Hepatitis B virus
ggacucuuggacuuuca

SEQ ID NO: 2354 - RNA, 17 nt, Hepatitis B virus
gacucuuggacuuucag

SEQ ID NO: 2355 - RNA, 17 nt, Hepatitis B virus
gaccuugaggcauacuu

SEQ ID NO: 2356 - RNA, 17 nt, Hepatitis B virus
acuucaaagacugugug

SEQ ID NO: 2357 - RNA, 17 nt, Hepatitis B virus
uaaugagugggaggagu

SEQ ID NO: 2358 - RNA, 17 nt, Hepatitis B virus
aaugagugggaggaguu

SEQ ID NO: 2359 - RNA, 17 nt, Hepatitis B virus
augagugggaggaguug

SEQ ID NO: 2360 - RNA, 17 nt, Hepatitis B virus
gagugggaggaguuggg

SEQ ID NO: 2361 - RNA, 17 nt, Hepatitis B virus
agugggaggaguugggg

SEQ ID NO: 2362 - RNA, 17 nt, Hepatitis B virus
gaggaguugggggagga

SEQ ID NO: 2363 - RNA, 17 nt, Hepatitis B virus
aggaguugggggaggag

SEQ ID NO: 2364 - RNA, 17 nt, Hepatitis B virus
ggaguugggggaggagg

SEQ ID NO: 2365 - RNA, 17 nt, Hepatitis B virus
gaguugggggaggaggu

SEQ ID NO: 2366 - RNA, 17 nt, Hepatitis B virus
aguugggggaggagguu

SEQ ID NO: 2367 - RNA, 17 nt, Hepatitis B virus
uugggggaggagguuag

SEQ ID NO: 2368 - RNA, 17 nt, Hepatitis B virus
ugggggaggagguuagg

SEQ ID NO: 2369 - RNA, 17 nt, Hepatitis B virus
ggggaggagguuagguu

SEQ ID NO: 2370 - RNA, 17 nt, Hepatitis B virus
ggagguuagguuaaagg

SEQ ID NO: 2371 - RNA, 17 nt, Hepatitis B virus
agguuaaaggucuuugu

SEQ ID NO: 2372 - RNA, 17 nt, Hepatitis B virus
uuguacuaggaggcugu

SEQ ID NO: 2373 - RNA, 17 nt, Hepatitis B virus
uguacuaggaggcugua

SEQ ID NO: 2374 - RNA, 17 nt, Hepatitis B virus
uacuaggaggcuguagg

SEQ ID NO: 2375 - RNA, 17 nt, Hepatitis B virus
aggcuguaggcauaaau

SEQ ID NO: 2376 - RNA, 17 nt, Hepatitis B virus
cauaaauugguguguuc

SEQ ID NO: 2377 - RNA, 17 nt, Hepatitis B virus
ugugccuuggguggcuu

SEQ ID NO: 2378 - RNA, 17 nt, Hepatitis B virus
gugccuuggguggcuuu

SEQ ID NO: 2379 - RNA, 17 nt, Hepatitis B virus
ccuuggguggcuuuggg

SEQ ID NO: 2380 - RNA, 17 nt, Hepatitis B virus
guggcuuuggggcaugg

SEQ ID NO: 2381 - RNA, 17 nt, Hepatitis B virus
uggcuuuggggcaugga

SEQ ID NO: 2382 - RNA, 17 nt, Hepatitis B virus
ggcuuuggggcauggac

SEQ ID NO: 2383 - RNA, 17 nt, Hepatitis B virus
uggggcauggacauuga

SEQ ID NO: 2384 - RNA, 17 nt, Hepatitis B virus
ggggcauggacauugac

SEQ ID NO: 2385 - RNA, 17 nt, Hepatitis B virus
cguauaaagaauuugga

SEQ ID NO: 2386 - RNA, 17 nt, Hepatitis B virus
aagaauuuggagcuucu

SEQ ID NO: 2387 - RNA, 17 nt, Hepatitis B virus
agaauuuggagcuucug

SEQ ID NO: 2388 - RNA, 17 nt, Hepatitis B virus
gcuucuguggaguuacu

SEQ ID NO: 2389 - RNA, 17 nt, Hepatitis B virus
cuucuguggaguuacuc

SEQ ID NO: 2390 - RNA, 17 nt, Hepatitis B virus
cuauucgagaucuccuc

SEQ ID NO: 2391 - RNA, 17 nt, Hepatitis B virus
ucuguaucggggggccu

SEQ ID NO: 2392 - RNA, 17 nt, Hepatitis B virus
cuguaucggggggccuu

SEQ ID NO: 2393 - RNA, 17 nt, Hepatitis B virus
uguaucggggggccuua

SEQ ID NO: 2394 - RNA, 17 nt, Hepatitis B virus
guaucggggggccuuag

SEQ ID NO: 2395 - RNA, 17 nt, Hepatitis B virus
uaucggggggccuuaga

SEQ ID NO: 2396 - RNA, 17 nt, Hepatitis B virus
gggccuuagagucuccg

SEQ ID NO: 2397 - RNA, 17 nt, Hepatitis B virus
gagucuccggaacauug

SEQ ID NO: 2398 - RNA, 17 nt, Hepatitis B virus
agucuccggaacauugu

SEQ ID NO: 2399 - RNA, 17 nt, Hepatitis B virus
caccauacggcacucag

SEQ ID NO: 2400 - RNA, 17 nt, Hepatitis B virus
ggcacucaggcaagcua

SEQ ID NO: 2401 - RNA, 17 nt, Hepatitis B virus
ucuguguuggggugagu

SEQ ID NO: 2402 - RNA, 17 nt, Hepatitis B virus
cuguguuggggugaguu

SEQ ID NO: 2403 - RNA, 17 nt, Hepatitis B virus
uguguuggggugaguug

SEQ ID NO: 2404 - RNA, 17 nt, Hepatitis B virus
agccaccugggugggaa

SEQ ID NO: 2405 - RNA, 17 nt, Hepatitis B virus
gccaccugggugggaag

SEQ ID NO: 2406 - RNA, 17 nt, Hepatitis B virus
accugggugggaaguaa

SEQ ID NO: 2407 - RNA, 17 nt, Hepatitis B virus
ccugggugggaaguaau

SEQ ID NO: 2408 - RNA, 17 nt, Hepatitis B virus
cugggugggaaguaauu

SEQ ID NO: 2409 - RNA, 17 nt, Hepatitis B virus
aguaauuuggaagaucc

SEQ ID NO: 2410 - RNA, 17 nt, Hepatitis B virus
guaauuuggaagaucca

SEQ ID NO: 2411 - RNA, 17 nt, Hepatitis B virus
auuuggaagauccagca

SEQ ID NO: 2412 - RNA, 17 nt, Hepatitis B virus
agcauccagggaauuag

SEQ ID NO: 2413 - RNA, 17 nt, Hepatitis B virus
gcauccagggaauuagu

SEQ ID NO: 2414 - RNA, 17 nt, Hepatitis B virus
cauccagggaauuagua

SEQ ID NO: 2415 - RNA, 17 nt, Hepatitis B virus
guuaauaugggccuaaa

SEQ ID NO: 2416 - RNA, 17 nt, Hepatitis B virus
uuaauaugggccuaaaa

SEQ ID NO: 2417 - RNA, 17 nt, Hepatitis B virus
aaaaaucagacaacuau

SEQ ID NO: 2418 - RNA, 17 nt, Hepatitis B virus
acuauugugguuucaca

SEQ ID NO: 2419 - RNA, 17 nt, Hepatitis B virus
uuacuuuugggcgagaa

SEQ ID NO: 2420 - RNA, 17 nt, Hepatitis B virus
uacuuuugggcgagaaa

SEQ ID NO: 2421 - RNA, 17 nt, Hepatitis B virus
uugggcgagaaacuguu

SEQ ID NO: 2422 - RNA, 17 nt, Hepatitis B virus
gaauauuuggugucuuu

SEQ ID NO: 2423 - RNA, 17 nt, Hepatitis B virus
ugucuuuuggagugugg

SEQ ID NO: 2424 - RNA, 17 nt, Hepatitis B virus
gucuuuuggagugugga

SEQ ID NO: 2425 - RNA, 17 nt, Hepatitis B virus
uggaguguggauucgca

SEQ ID NO: 2426 - RNA, 17 nt, Hepatitis B virus
ggaguguggauucgcac

SEQ ID NO: 2427 - RNA, 17 nt, Hepatitis B virus
ugcauauagaccaccaa

SEQ ID NO: 2428 - RNA, 17 nt, Hepatitis B virus
acacuuccggaaacuac

SEQ ID NO: 2429 - RNA, 17 nt, Hepatitis B virus
cacuuccggaaacuacu

SEQ ID NO: 2430 - RNA, 17 nt, Hepatitis B virus
uguuguuagacgaagag

SEQ ID NO: 2431 - RNA, 17 nt, Hepatitis B virus
uagacgaagaggcaggu

SEQ ID NO: 2432 - RNA, 17 nt, Hepatitis B virus
gacgaagaggcaggucc

SEQ ID NO: 2433 - RNA, 17 nt, Hepatitis B virus
aagaggcagguccccua

SEQ ID NO: 2434 - RNA, 17 nt, Hepatitis B virus
guccccuagaagaagaa

SEQ ID NO: 2435 - RNA, 17 nt, Hepatitis B virus
cccuagaagaagaacuc

SEQ ID NO: 2436 - RNA, 17 nt, Hepatitis B virus
uagaagaagaacucccu

SEQ ID NO: 2437 - RNA, 17 nt, Hepatitis B virus
gccucgcagacgaaggu

SEQ ID NO: 2438 - RNA, 17 nt, Hepatitis B virus
cagacgaaggucucaau

SEQ ID NO: 2439 - RNA, 17 nt, Hepatitis B virus
gcgucgcagaagaucuc

SEQ ID NO: 2440 - RNA, 17 nt, Hepatitis B virus
ucgcagaagaucucaau

SEQ ID NO: 2441 - RNA, 17 nt, Hepatitis B virus
ucaaucucgggaaucuc

SEQ ID NO: 2442 - RNA, 17 nt, Hepatitis B virus
caaucucgggaaucuca

SEQ ID NO: 2443 - RNA, 17 nt, Hepatitis B virus
aaucucgggaaucucaa

SEQ ID NO: 2444 - RNA, 17 nt, Hepatitis B virus
uauuccuuggacacaua

SEQ ID NO: 2445 - RNA, 17 nt, Hepatitis B virus
auuccuuggacacauaa

SEQ ID NO: 2446 - RNA, 17 nt, Hepatitis B virus
acacauaaggugggaaa

SEQ ID NO: 2447 - RNA, 17 nt, Hepatitis B virus
cauaaggugggaaacuu

SEQ ID NO: 2448 - RNA, 17 nt, Hepatitis B virus
auaaggugggaaacuuu

SEQ ID NO: 2449 - RNA, 17 nt, Hepatitis B virus
uaaggugggaaacuuua

SEQ ID NO: 2450 - RNA, 17 nt, Hepatitis B virus
aacuuuacggggcuuua

SEQ ID NO: 2451 - RNA, 17 nt, Hepatitis B virus
acuuuacggggcuuuau

SEQ ID NO: 2452 - RNA, 17 nt, Hepatitis B virus
cuuuacggggcuuuauu

SEQ ID NO: 2453 - RNA, 17 nt, Hepatitis B virus
ucuucuacgguaccuug

SEQ ID NO: 2454 - RNA, 17 nt, Hepatitis B virus
uccuaaauggcaaacuc

SEQ ID NO: 2455 - RNA, 17 nt, Hepatitis B virus
cauuugcaggaggacau

SEQ ID NO: 2456 - RNA, 17 nt, Hepatitis B virus
auuugcaggaggacauu

SEQ ID NO: 2457 - RNA, 17 nt, Hepatitis B virus
uugcaggaggacauugu

SEQ ID NO: 2458 - RNA, 17 nt, Hepatitis B virus
ugcaggaggacauuguu

SEQ ID NO: 2459 - RNA, 17 nt, Hepatitis B virus
uguugauagauguaagc

SEQ ID NO: 2460 - RNA, 17 nt, Hepatitis B virus
caauuuguggggccccu

SEQ ID NO: 2461 - RNA, 17 nt, Hepatitis B virus
aauuuguggggccccuu

SEQ ID NO: 2462 - RNA, 17 nt, Hepatitis B virus
auuuguggggccccuua

SEQ ID NO: 2463 - RNA, 17 nt, Hepatitis B virus
ugaaaacaggagacuua

SEQ ID NO: 2464 - RNA, 17 nt, Hepatitis B virus
gaaaacaggagacuuaa

SEQ ID NO: 2465 - RNA, 17 nt, Hepatitis B virus
aaacaggagacuuaaau

SEQ ID NO: 2466 - RNA, 17 nt, Hepatitis B virus
gccugcuagguuuuauc

SEQ ID NO: 2467 - RNA, 17 nt, Hepatitis B virus
ugcccuuagauaaaggg

SEQ ID NO: 2468 - RNA, 17 nt, Hepatitis B virus
uagauaaagggaucaaa

SEQ ID NO: 2469 - RNA, 17 nt, Hepatitis B virus
agauaaagggaucaaac

SEQ ID NO: 2470 - RNA, 17 nt, Hepatitis B virus
gauaaagggaucaaacc

SEQ ID NO: 2471 - RNA, 17 nt, Hepatitis B virus
auuauccagaguaugua

SEQ ID NO: 2472 - RNA, 17 nt, Hepatitis B virus
uacuuccagacgcgaca

SEQ ID NO: 2473 - RNA, 17 nt, Hepatitis B virus
cacucuuuggaaggcgg

SEQ ID NO: 2474 - RNA, 17 nt, Hepatitis B virus
acucuuuggaaggcggg

SEQ ID NO: 2475 - RNA, 17 nt, Hepatitis B virus
cuuuggaaggcggggau

SEQ ID NO: 2476 - RNA, 17 nt, Hepatitis B virus
uggaaggcggggaucuu

SEQ ID NO: 2477 - RNA, 17 nt, Hepatitis B virus
ggaaggcggggaucuua

SEQ ID NO: 2478 - RNA, 17 nt, Hepatitis B virus
gaaggcggggaucuuau

SEQ ID NO: 2479 - RNA, 17 nt, Hepatitis B virus
aaggcggggaucuuaua

SEQ ID NO: 2480 - RNA, 17 nt, Hepatitis B virus
auauaaaagagagucca

SEQ ID NO: 2481 - RNA, 17 nt, Hepatitis B virus
auaaaagagaguccaca

SEQ ID NO: 2482 - RNA, 17 nt, Hepatitis B virus
cauuuugcgggucacca

SEQ ID NO: 2483 - RNA, 17 nt, Hepatitis B virus
auuuugcgggucaccau

SEQ ID NO: 2484 - RNA, 17 nt, Hepatitis B virus
auauucuugggaacaag

SEQ ID NO: 2485 - RNA, 17 nt, Hepatitis B virus
uauucuugggaacaaga

SEQ ID NO: 2486 - RNA, 17 nt, Hepatitis B virus
auucuugggaacaagau

SEQ ID NO: 2487 - RNA, 17 nt, Hepatitis B virus
gggaacaagaucuacag

SEQ ID NO: 2488 - RNA, 17 nt, Hepatitis B virus
uacagcaugggagguug

SEQ ID NO: 2489 - RNA, 17 nt, Hepatitis B virus
acagcaugggagguugg

SEQ ID NO: 2490 - RNA, 17 nt, Hepatitis B virus
cagcaugggagguuggu

SEQ ID NO: 2491 - RNA, 17 nt, Hepatitis B virus
gcaugggagguuggucu

SEQ ID NO: 2492 - RNA, 17 nt, Hepatitis B virus
gggagguuggucuucca

SEQ ID NO: 2493 - RNA, 17 nt, Hepatitis B virus
cucgaaaaggcaugggg

SEQ ID NO: 2494 - RNA, 17 nt, Hepatitis B virus
aaaggcauggggacaaa

SEQ ID NO: 2495 - RNA, 17 nt, Hepatitis B virus
aaggcauggggacaaau

SEQ ID NO: 2496 - RNA, 17 nt, Hepatitis B virus
aggcauggggacaaauc

SEQ ID NO: 2497 - RNA, 17 nt, Hepatitis B virus
ggcauggggacaaaucu

SEQ ID NO: 2498 - RNA, 17 nt, Hepatitis B virus
aauccccugggauucuu

SEQ ID NO: 2499 - RNA, 17 nt, Hepatitis B virus
auccccugggauucuuc

SEQ ID NO: 2500 - RNA, 17 nt, Hepatitis B virus
uccccugggauucuucc

SEQ ID NO: 2501 - RNA, 17 nt, Hepatitis B virus
caucaguuggacccugc

SEQ ID NO: 2502 - RNA, 17 nt, Hepatitis B virus
aucaguuggacccugca

SEQ ID NO: 2503 - RNA, 17 nt, Hepatitis B virus
uaaauccagauugggac

SEQ ID NO: 2504 - RNA, 17 nt, Hepatitis B virus
uccagauugggaccuca

SEQ ID NO: 2505 - RNA, 17 nt, Hepatitis B virus
ccagauugggaccucaa

SEQ ID NO: 2506 - RNA, 17 nt, Hepatitis B virus
cagauugggaccucaac

SEQ ID NO: 2507 - RNA, 17 nt, Hepatitis B virus
ccgcacaaggacaacug

SEQ ID NO: 2508 - RNA, 17 nt, Hepatitis B virus
cgcacaaggacaacugg

SEQ ID NO: 2509 - RNA, 17 nt, Hepatitis B virus
ggacaacuggccggacg

SEQ ID NO: 2510 - RNA, 17 nt, Hepatitis B virus
aacuggccggacgccaa

SEQ ID NO: 2511 - RNA, 17 nt, Hepatitis B virus
acuggccggacgccaac

SEQ ID NO: 2512 - RNA, 17 nt, Hepatitis B virus
gccaacaaggugggagu

SEQ ID NO: 2513 - RNA, 17 nt, Hepatitis B virus
aacaaggugggaguggg

SEQ ID NO: 2514 - RNA, 17 nt, Hepatitis B virus
acaaggugggaguggga

SEQ ID NO: 2515 - RNA, 17 nt, Hepatitis B virus
caaggugggagugggag

SEQ ID NO: 2516 - RNA, 17 nt, Hepatitis B virus
gugggagugggagcauu

SEQ ID NO: 2517 - RNA, 17 nt, Hepatitis B virus
ugggagugggagcauuc

SEQ ID NO: 2518 - RNA, 17 nt, Hepatitis B virus
gggagugggagcauucg

SEQ ID NO: 2519 - RNA, 17 nt, Hepatitis B virus
gagcauucgggccaggg

SEQ ID NO: 2520 - RNA, 17 nt, Hepatitis B virus
agcauucgggccagggu

SEQ ID NO: 2521 - RNA, 17 nt, Hepatitis B virus
ucgggccaggguucacc

SEQ ID NO: 2522 - RNA, 17 nt, Hepatitis B virus
cgggccaggguucaccc

SEQ ID NO: 2523 - RNA, 17 nt, Hepatitis B virus
cuccccaugggggacug

SEQ ID NO: 2524 - RNA, 17 nt, Hepatitis B virus
uccccaugggggacugu

SEQ ID NO: 2525 - RNA, 17 nt, Hepatitis B virus
ccccaugggggacuguu

SEQ ID NO: 2526 - RNA, 17 nt, Hepatitis B virus
cccaugggggacuguug

SEQ ID NO: 2527 - RNA, 17 nt, Hepatitis B virus
ccaugggggacuguugg

SEQ ID NO: 2528 - RNA, 17 nt, Hepatitis B virus
ggacuguugggguggag

SEQ ID NO: 2529 - RNA, 17 nt, Hepatitis B virus
gacuguugggguggagc

SEQ ID NO: 2530 - RNA, 17 nt, Hepatitis B virus
acuguugggguggagcc

SEQ ID NO: 2531 - RNA, 17 nt, Hepatitis B virus
guugggguggagcccuc

SEQ ID NO: 2532 - RNA, 17 nt, Hepatitis B virus
uugggguggagcccuca

SEQ ID NO: 2533 - RNA, 17 nt, Hepatitis B virus
cacgcucagggccuacu

SEQ ID NO: 2534 - RNA, 17 nt, Hepatitis B virus
acgcucagggccuacuc

SEQ ID NO: 2535 - RNA, 17 nt, Hepatitis B virus
caccaaucggcagucag

SEQ ID NO: 2536 - RNA, 17 nt, Hepatitis B virus
ggcagucaggaaggcag

SEQ ID NO: 2537 - RNA, 17 nt, Hepatitis B virus
gcagucaggaaggcagc

SEQ ID NO: 2538 - RNA, 17 nt, Hepatitis B virus
gucaggaaggcagccua

SEQ ID NO: 2539 - RNA, 17 nt, Hepatitis B virus
accucuaagggacacuc

SEQ ID NO: 2540 - RNA, 17 nt, Hepatitis B virus
ccucuaagggacacuca

SEQ ID NO: 2541 - RNA, 17 nt, Hepatitis B virus
cucuaagggacacucau

SEQ ID NO: 2542 - RNA, 17 nt, Hepatitis B virus
cauccucaggccaugca

SEQ ID NO: 2543 - RNA, 38 nt, Artificial Sequence
  Description of Artificial Sequence:  Enzymatic Nucleic Acid
uugguggacugaugaggccguuaggccgaaaguggugg

SEQ ID NO: 2544 - RNA, 38 nt, Artificial Sequence
  Description of Artificial Sequence:  Enzymatic Nucleic Acid
uuugguggcugaugaggccguuaggccgaaaaguggug

SEQ ID NO: 2545 - RNA, 38 nt, Artificial Sequence
  Description of Artificial Sequence:  Enzymatic Nucleic Acid
guuuggugcugaugaggccguuaggccgaaaaaguggu

SEQ ID NO: 2546 - RNA, 38 nt, Artificial Sequence
  Description of Artificial Sequence:  Enzymatic Nucleic Acid
aucuugaacugaugaggccguuaggccgaaaguuuggu

SEQ ID NO: 2547 - RNA, 38 nt, Artificial Sequence
  Description of Artificial Sequence:  Enzymatic Nucleic Acid
ggaucuugcugaugaggccguuaggccgaaagaguuug

SEQ ID NO: 2548 - RNA, 38 nt, Artificial Sequence
  Description of Artificial Sequence:  Enzymatic Nucleic Acid
gggaucuucugaugaggccguuaggccgaaaagaguuu

SEQ ID NO: 2549 - RNA, 38 nt, Artificial Sequence
  Description of Artificial Sequence:  Enzymatic Nucleic Acid
gacucuggcugaugaggccguuaggccgaaaucuugaa

SEQ ID NO: 2550 - RNA, 38 nt, Artificial Sequence
  Description of Artificial Sequence:  Enzymatic Nucleic Acid
agggcccucugaugaggccguuaggccgaaacucuggg

SEQ ID NO: 2551 - RNA, 38 nt, Artificial Sequence
  Description of Artificial Sequence:  Enzymatic Nucleic Acid
caggaaagcugaugaggccguuaggccgaaacagggcc

SEQ ID NO: 2552 - RNA, 38 nt, Artificial Sequence
  Description of Artificial Sequence:  Enzymatic Nucleic Acid
cagcaggacugaugaggccguuaggccgaaaguacagg

SEQ ID NO: 2553 - RNA, 38 nt, Artificial Sequence
  Description of Artificial Sequence:  Enzymatic Nucleic Acid
ccagcaggcugaugaggccguuaggccgaaaaguacag

SEQ ID NO: 2554 - RNA, 38 nt, Artificial Sequence
  Description of Artificial Sequence:  Enzymatic Nucleic Acid
accagcagcugaugaggccguuaggccgaaaaaguaca

SEQ ID NO: 2555 - RNA, 38 nt, Artificial Sequence
  Description of Artificial Sequence:  Enzymatic Nucleic Acid
cugaacugcugaugaggccguuaggccgaaagccacca

SEQ ID NO: 2556 - RNA, 38 nt, Artificial Sequence
  Description of Artificial Sequence:  Enzymatic Nucleic Acid
uguuccugcugaugaggccguuaggccgaaacuggagc

SEQ ID NO: 2557 - RNA, 38 nt, Artificial Sequence
  Description of Artificial Sequence:  Enzymatic Nucleic Acid
cuguuccucugaugaggccguuaggccgaaaacuggag

SEQ ID NO: 2558 - RNA, 38 nt, Artificial Sequence
  Description of Artificial Sequence:  Enzymatic Nucleic Acid
aguauucucugaugaggccguuaggccgaaagcagggc

SEQ ID NO: 2559 - RNA, 38 nt, Artificial Sequence
  Description of Artificial Sequence:  Enzymatic Nucleic Acid
agagacagcugaugaggccguuaggccgaaauucugag

SEQ ID NO: 2560 - RNA, 38 nt, Artificial Sequence
  Description of Artificial Sequence:  Enzymatic Nucleic Acid
auggcagacugaugaggccguuaggccgaaacaguauu

SEQ ID NO: 2561 - RNA, 38 nt, Artificial Sequence
  Description of Artificial Sequence:  Enzymatic Nucleic Acid
auauggcacugaugaggccguuaggccgaaagacagua

SEQ ID NO: 2562 - RNA, 38 nt, Artificial Sequence
  Description of Artificial Sequence:  Enzymatic Nucleic Acid
auugacgacugaugaggccguuaggccgaaauggcaga

SEQ ID NO: 2563 - RNA, 38 nt, Artificial Sequence
  Description of Artificial Sequence:  Enzymatic Nucleic Acid
agauugaccugaugaggccguuaggccgaaauauggca

SEQ ID NO: 2564 - RNA, 38 nt, Artificial Sequence
  Description of Artificial Sequence:  Enzymatic Nucleic Acid
auaagauucugaugaggccguuaggccgaaacgauaug

SEQ ID NO: 2565 - RNA, 38 nt, Artificial Sequence
  Description of Artificial Sequence:  Enzymatic Nucleic Acid
uucgauaacugaugaggccguuaggccgaaauugacga

SEQ ID NO: 2566 - RNA, 38 nt, Artificial Sequence
  Description of Artificial Sequence:  Enzymatic Nucleic Acid
ucuucgaucugaugaggccguuaggccgaaagauugac

SEQ ID NO: 2567 - RNA, 38 nt, Artificial Sequence
  Description of Artificial Sequence:  Enzymatic Nucleic Acid
gucuucgacugaugaggccguuaggccgaaaagauuga

SEQ ID NO: 2568 - RNA, 38 nt, Artificial Sequence
  Description of Artificial Sequence:  Enzymatic Nucleic Acid
cagucuuccugaugaggccguuaggccgaaauaagauu

SEQ ID NO: 2569 - RNA, 38 nt, Artificial Sequence
  Description of Artificial Sequence:  Enzymatic Nucleic Acid
auguucggcugaugaggccguuaggccgaaacaggguc

SEQ ID NO: 2570 - RNA, 38 nt, Artificial Sequence
  Description of Artificial Sequence:  Enzymatic Nucleic Acid
ccugaugccugaugaggccguuaggccgaaauguucuc

SEQ ID NO: 2571 - RNA, 38 nt, Artificial Sequence
  Description of Artificial Sequence:  Enzymatic Nucleic Acid
ggaguccucugaugaggccguuaggccgaaaugcgaug

SEQ ID NO: 2572 - RNA, 38 nt, Artificial Sequence
  Description of Artificial Sequence:  Enzymatic Nucleic Acid
gguccuagcugaugaggccguuaggccgaaaguccuga

SEQ ID NO: 2573 - RNA, 38 nt, Artificial Sequence
  Description of Artificial Sequence:  Enzymatic Nucleic Acid
aggggucccugaugaggccguuaggccgaaaggagucc

SEQ ID NO: 2574 - RNA, 38 nt, Artificial Sequence
  Description of Artificial Sequence:  Enzymatic Nucleic Acid
uguaacaccugaugaggccguuaggccgaaagcagggg

SEQ ID NO: 2575 - RNA, 38 nt, Artificial Sequence
  Description of Artificial Sequence:  Enzymatic Nucleic Acid
ccgccugucugaugaggccguuaggccgaaacacgagc

SEQ ID NO: 2576 - RNA, 38 nt, Artificial Sequence
  Description of Artificial Sequence:  Enzymatic Nucleic Acid
cccgccugcugaugaggccguuaggccgaaaacacgag

SEQ ID NO: 2577 - RNA, 38 nt, Artificial Sequence
  Description of Artificial Sequence:  Enzymatic Nucleic Acid
acaagaaacugaugaggccguuaggccgaaaccccgcc

SEQ ID NO: 2578 - RNA, 38 nt, Artificial Sequence
  Description of Artificial Sequence:  Enzymatic Nucleic Acid
aacaagaacugaugaggccguuaggccgaaaaccccgc

SEQ ID NO: 2579 - RNA, 38 nt, Artificial Sequence
  Description of Artificial Sequence:  Enzymatic Nucleic Acid
caacaagacugaugaggccguuaggccgaaaaaccccg

SEQ ID NO: 2580 - RNA, 38 nt, Artificial Sequence
  Description of Artificial Sequence:  Enzymatic Nucleic Acid
ucaacaagcugaugaggccguuaggccgaaaaaacccc

SEQ ID NO: 2581 - RNA, 38 nt, Artificial Sequence
  Description of Artificial Sequence:  Enzymatic Nucleic Acid
gucaacaacugaugaggccguuaggccgaaaaaaaccc

SEQ ID NO: 2582 - RNA, 38 nt, Artificial Sequence
  Description of Artificial Sequence:  Enzymatic Nucleic Acid
uugucaaccugaugaggccguuaggccgaaagaaaaac

SEQ ID NO: 2583 - RNA, 38 nt, Artificial Sequence
  Description of Artificial Sequence:  Enzymatic Nucleic Acid
uuuuuguccugaugaggccguuaggccgaaacaagaaa

SEQ ID NO: 2584 - RNA, 38 nt, Artificial Sequence
  Description of Artificial Sequence:  Enzymatic Nucleic Acid
auugugagcugaugaggccguuaggccgaaauuuuugu

SEQ ID NO: 2585 - RNA, 38 nt, Artificial Sequence
  Description of Artificial Sequence:  Enzymatic Nucleic Acid
gguauugucugaugaggccguuaggccgaaaggauuuu

SEQ ID NO: 2586 - RNA, 38 nt, Artificial Sequence
  Description of Artificial Sequence:  Enzymatic Nucleic Acid
cucuguggcugaugaggccguuaggccgaaauugugag

SEQ ID NO: 2587 - RNA, 38 nt, Artificial Sequence
  Description of Artificial Sequence:  Enzymatic Nucleic Acid
cgagucuacugaugaggccguuaggccgaaacucugug

SEQ ID NO: 2588 - RNA, 38 nt, Artificial Sequence
  Description of Artificial Sequence:  Enzymatic Nucleic Acid
cacgaguccugaugaggccguuaggccgaaagacucug

SEQ ID NO: 2589 - RNA, 38 nt, Artificial Sequence
  Description of Artificial Sequence:  Enzymatic Nucleic Acid
uccaccaccugaugaggccguuaggccgaaagucuaga

SEQ ID NO: 2590 - RNA, 38 nt, Artificial Sequence
  Description of Artificial Sequence:  Enzymatic Nucleic Acid
auugagagcugaugaggccguuaggccgaaaguccacc

SEQ ID NO: 2591 - RNA, 38 nt, Artificial Sequence
  Description of Artificial Sequence:  Enzymatic Nucleic Acid
aauugagacugaugaggccguuaggccgaaaaguccac

SEQ ID NO: 2592 - RNA, 38 nt, Artificial Sequence
  Description of Artificial Sequence:  Enzymatic Nucleic Acid
aaaauugacugaugaggccguuaggccgaaagaagucc

SEQ ID NO: 2593 - RNA, 38 nt, Artificial Sequence
  Description of Artificial Sequence:  Enzymatic Nucleic Acid
agaaaauucugaugaggccguuaggccgaaagagaagu

SEQ ID NO: 2594 - RNA, 38 nt, Artificial Sequence
  Description of Artificial Sequence:  Enzymatic Nucleic Acid
cccuagaacugaugaggccguuaggccgaaauugagag

SEQ ID NO: 2595 - RNA, 38 nt, Artificial Sequence
  Description of Artificial Sequence:  Enzymatic Nucleic Acid
ccccuagacugaugaggccguuaggccgaaaauugaga

SEQ ID NO: 2596 - RNA, 38 nt, Artificial Sequence
  Description of Artificial Sequence:  Enzymatic Nucleic Acid
cccccuagcugaugaggccguuaggccgaaaaauugag

SEQ ID NO: 2597 - RNA, 38 nt, Artificial Sequence
  Description of Artificial Sequence:  Enzymatic Nucleic Acid
ucccccuacugaugaggccguuaggccgaaaaaauuga

SEQ ID NO: 2598 - RNA, 38 nt, Artificial Sequence
  Description of Artificial Sequence:  Enzymatic Nucleic Acid
guuccccccugaugaggccguuaggccgaaagaaaauu

SEQ ID NO: 2599 - RNA, 38 nt, Artificial Sequence
  Description of Artificial Sequence:  Enzymatic Nucleic Acid
uuggccaacugaugaggccguuaggccgaaacacacgg

SEQ ID NO: 2600 - RNA, 38 nt, Artificial Sequence
  Description of Artificial Sequence:  Enzymatic Nucleic Acid
uuuuggcccugaugaggccguuaggccgaaagacacac

SEQ ID NO: 2601 - RNA, 38 nt, Artificial Sequence
  Description of Artificial Sequence:  Enzymatic Nucleic Acid
ggacugcgcugaugaggccguuaggccgaaauuuuggc

SEQ ID NO: 2602 - RNA, 38 nt, Artificial Sequence
  Description of Artificial Sequence:  Enzymatic Nucleic Acid
gggacugccugaugaggccguuaggccgaaaauuuugg

SEQ ID NO: 2603 - RNA, 38 nt, Artificial Sequence
  Description of Artificial Sequence:  Enzymatic Nucleic Acid
agauuuggcugaugaggccguuaggccgaaacugcgaa

SEQ ID NO: 2604 - RNA, 38 nt, Artificial Sequence
  Description of Artificial Sequence:  Enzymatic Nucleic Acid
ugacuggacugaugaggccguuaggccgaaauuuggga

SEQ ID NO: 2605 - RNA, 38 nt, Artificial Sequence
  Description of Artificial Sequence:  Enzymatic Nucleic Acid
agugacugcugaugaggccguuaggccgaaagauuugg

SEQ ID NO: 2606 - RNA, 38 nt, Artificial Sequence
  Description of Artificial Sequence:  Enzymatic Nucleic Acid
uggugagucugaugaggccguuaggccgaaacuggaga

SEQ ID NO: 2607 - RNA, 38 nt, Artificial Sequence
  Description of Artificial Sequence:  Enzymatic Nucleic Acid
agguuggucugaugaggccguuaggccgaaagugacug

SEQ ID NO: 2608 - RNA, 38 nt, Artificial Sequence
  Description of Artificial Sequence:  Enzymatic Nucleic Acid
uggaggaccugaugaggccguuaggccgaaacagguug

SEQ ID NO: 2609 - RNA, 38 nt, Artificial Sequence
  Description of Artificial Sequence:  Enzymatic Nucleic Acid
aauuggagcugaugaggccguuaggccgaaacaacagg

SEQ ID NO: 2610 - RNA, 38 nt, Artificial Sequence
  Description of Artificial Sequence:  Enzymatic Nucleic Acid
acaaauugcugaugaggccguuaggccgaaaggacaac

SEQ ID NO: 2611 - RNA, 38 nt, Artificial Sequence
  Description of Artificial Sequence:  Enzymatic Nucleic Acid
ccaggacacugaugaggccguuaggccgaaauuggagg

SEQ ID NO: 2612 - RNA, 38 nt, Artificial Sequence
  Description of Artificial Sequence:  Enzymatic Nucleic Acid
accaggaccugaugaggccguuaggccgaaaauuggag

SEQ ID NO: 2613 - RNA, 38 nt, Artificial Sequence
  Description of Artificial Sequence:  Enzymatic Nucleic Acid
auaaccagcugaugaggccguuaggccgaaacaaauug

SEQ ID NO: 2614 - RNA, 38 nt, Artificial Sequence
  Description of Artificial Sequence:  Enzymatic Nucleic Acid
ccagcgaucugaugaggccguuaggccgaaaccaggac

SEQ ID NO: 2615 - RNA, 38 nt, Artificial Sequence
  Description of Artificial Sequence:  Enzymatic Nucleic Acid
uccagcgacugaugaggccguuaggccgaaaaccagga

SEQ ID NO: 2616 - RNA, 38 nt, Artificial Sequence
  Description of Artificial Sequence:  Enzymatic Nucleic Acid
cauccagccugaugaggccguuaggccgaaauaaccag

SEQ ID NO: 2617 - RNA, 38 nt, Artificial Sequence
  Description of Artificial Sequence:  Enzymatic Nucleic Acid
acgccgcacugaugaggccguuaggccgaaacacaucc

SEQ ID NO: 2618 - RNA, 38 nt, Artificial Sequence
  Description of Artificial Sequence:  Enzymatic Nucleic Acid
gaugauaacugaugaggccguuaggccgaaacgccgca

SEQ ID NO: 2619 - RNA, 38 nt, Artificial Sequence
  Description of Artificial Sequence:  Enzymatic Nucleic Acid
agaugauacugaugaggccguuaggccgaaaacgccgc

SEQ ID NO: 2620 - RNA, 38 nt, Artificial Sequence
  Description of Artificial Sequence:  Enzymatic Nucleic Acid
aagaugaucugaugaggccguuaggccgaaaaacgccg

SEQ ID NO: 2621 - RNA, 38 nt, Artificial Sequence
  Description of Artificial Sequence:  Enzymatic Nucleic Acid
gaagaugacugaugaggccguuaggccgaaaaaacgcc

SEQ ID NO: 2622 - RNA, 38 nt, Artificial Sequence
  Description of Artificial Sequence:  Enzymatic Nucleic Acid
aggaagaucugaugaggccguuaggccgaaauaaaacg

SEQ ID NO: 2623 - RNA, 38 nt, Artificial Sequence
  Description of Artificial Sequence:  Enzymatic Nucleic Acid
cagaggaacugaugaggccguuaggccgaaaugauaaa

SEQ ID NO: 2624 - RNA, 38 nt, Artificial Sequence
  Description of Artificial Sequence:  Enzymatic Nucleic Acid
ugcagaggcugaugaggccguuaggccgaaagaugaua

SEQ ID NO: 2625 - RNA, 38 nt, Artificial Sequence
  Description of Artificial Sequence:  Enzymatic Nucleic Acid
augcagagcugaugaggccguuaggccgaaaagaugau

SEQ ID NO: 2626 - RNA, 38 nt, Artificial Sequence
  Description of Artificial Sequence:  Enzymatic Nucleic Acid
aggaugcacugaugaggccguuaggccgaaaggaagau

SEQ ID NO: 2627 - RNA, 38 nt, Artificial Sequence
  Description of Artificial Sequence:  Enzymatic Nucleic Acid
agcagcagcugaugaggccguuaggccgaaaugcagag

SEQ ID NO: 2628 - RNA, 38 nt, Artificial Sequence
  Description of Artificial Sequence:  Enzymatic Nucleic Acid
augaggcacugaugaggccguuaggccgaaagcagcag

SEQ ID NO: 2629 - RNA, 38 nt, Artificial Sequence
  Description of Artificial Sequence:  Enzymatic Nucleic Acid
aagaagaucugaugaggccguuaggccgaaaggcauag

SEQ ID NO: 2630 - RNA, 38 nt, Artificial Sequence
  Description of Artificial Sequence:  Enzymatic Nucleic Acid
aacaagaacugaugaggccguuaggccgaaaugaggca

SEQ ID NO: 2631 - RNA, 38 nt, Artificial Sequence
  Description of Artificial Sequence:  Enzymatic Nucleic Acid
ccaacaagcugaugaggccguuaggccgaaagaugagg

SEQ ID NO: 2632 - RNA, 38 nt, Artificial Sequence
  Description of Artificial Sequence:  Enzymatic Nucleic Acid
accaacaacugaugaggccguuaggccgaaaagaugag

SEQ ID NO: 2633 - RNA, 38 nt, Artificial Sequence
  Description of Artificial Sequence:  Enzymatic Nucleic Acid
gaaccaaccugaugaggccguuaggccgaaagaagaug

SEQ ID NO: 2634 - RNA, 38 nt, Artificial Sequence
  Description of Artificial Sequence:  Enzymatic Nucleic Acid
gaagaacccugaugaggccguuaggccgaaacaagaag

SEQ ID NO: 2635 - RNA, 38 nt, Artificial Sequence
  Description of Artificial Sequence:  Enzymatic Nucleic Acid
uccagaagcugaugaggccguuaggccgaaaccaacaa

SEQ ID NO: 2636 - RNA, 38 nt, Artificial Sequence
  Description of Artificial Sequence:  Enzymatic Nucleic Acid
guccagaacugaugaggccguuaggccgaaaaccaaca

SEQ ID NO: 2637 - RNA, 38 nt, Artificial Sequence
  Description of Artificial Sequence:  Enzymatic Nucleic Acid
uaguccagcugaugaggccguuaggccgaaagaaccaa

SEQ ID NO: 2638 - RNA, 38 nt, Artificial Sequence
  Description of Artificial Sequence:  Enzymatic Nucleic Acid
auaguccacugaugaggccguuaggccgaaaagaacca

SEQ ID NO: 2639 - RNA, 38 nt, Artificial Sequence
  Description of Artificial Sequence:  Enzymatic Nucleic Acid
uaccuugacugaugaggccguuaggccgaaaguccaga

SEQ ID NO: 2640 - RNA, 38 nt, Artificial Sequence
  Description of Artificial Sequence:  Enzymatic Nucleic Acid
cauaccuucugaugaggccguuaggccgaaauagucca

SEQ ID NO: 2641 - RNA, 38 nt, Artificial Sequence
  Description of Artificial Sequence:  Enzymatic Nucleic Acid
gggcaacacugaugaggccguuaggccgaaaccuugau

SEQ ID NO: 2642 - RNA, 38 nt, Artificial Sequence
  Description of Artificial Sequence:  Enzymatic Nucleic Acid
aaacgggccugaugaggccguuaggccgaaacauaccu

SEQ ID NO: 2643 - RNA, 38 nt, Artificial Sequence
  Description of Artificial Sequence:  Enzymatic Nucleic Acid
agaggacacugaugaggccguuaggccgaaacgggcaa

SEQ ID NO: 2644 - RNA, 38 nt, Artificial Sequence
  Description of Artificial Sequence:  Enzymatic Nucleic Acid
uagaggaccugaugaggccguuaggccgaaaacgggca

SEQ ID NO: 2645 - RNA, 38 nt, Artificial Sequence
  Description of Artificial Sequence:  Enzymatic Nucleic Acid
aauuagagcugaugaggccguuaggccgaaacaaacgg

SEQ ID NO: 2646 - RNA, 38 nt, Artificial Sequence
  Description of Artificial Sequence:  Enzymatic Nucleic Acid
uggaauuacugaugaggccguuaggccgaaaggacaaa

SEQ ID NO: 2647 - RNA, 38 nt, Artificial Sequence
  Description of Artificial Sequence:  Enzymatic Nucleic Acid
ccuggaaucugaugaggccguuaggccgaaagaggaca

SEQ ID NO: 2648 - RNA, 38 nt, Artificial Sequence
  Description of Artificial Sequence:  Enzymatic Nucleic Acid
gauccuggcugaugaggccguuaggccgaaauuagagg

SEQ ID NO: 2649 - RNA, 38 nt, Artificial Sequence
  Description of Artificial Sequence:  Enzymatic Nucleic Acid
ugauccugcugaugaggccguuaggccgaaaauuagag

SEQ ID NO: 2650 - RNA, 38 nt, Artificial Sequence
  Description of Artificial Sequence:  Enzymatic Nucleic Acid
uuguugaucugaugaggccguuaggccgaaauccugga

SEQ ID NO: 2651 - RNA, 38 nt, Artificial Sequence
  Description of Artificial Sequence:  Enzymatic Nucleic Acid
ugguuguucugaugaggccguuaggccgaaaugauccu

SEQ ID NO: 2652 - RNA, 38 nt, Artificial Sequence
  Description of Artificial Sequence:  Enzymatic Nucleic Acid
uugagcagcugaugaggccguuaggccgaaaguugugc

SEQ ID NO: 2653 - RNA, 38 nt, Artificial Sequence
  Description of Artificial Sequence:  Enzymatic Nucleic Acid
gguuccuucugaugaggccguuaggccgaaagcaggag

SEQ ID NO: 2654 - RNA, 38 nt, Artificial Sequence
  Description of Artificial Sequence:  Enzymatic Nucleic Acid
gaaacauacugaugaggccguuaggccgaaagguuccu

SEQ ID NO: 2655 - RNA, 38 nt, Artificial Sequence
  Description of Artificial Sequence:  Enzymatic Nucleic Acid
gggaaacacugaugaggccguuaggccgaaagagguuc

SEQ ID NO: 2656 - RNA, 38 nt, Artificial Sequence
  Description of Artificial Sequence:  Enzymatic Nucleic Acid
augagggacugaugaggccguuaggccgaaacauagag

SEQ ID NO: 2657 - RNA, 38 nt, Artificial Sequence
  Description of Artificial Sequence:  Enzymatic Nucleic Acid
caugagggcugaugaggccguuaggccgaaaacauaga

SEQ ID NO: 2658 - RNA, 38 nt, Artificial Sequence
  Description of Artificial Sequence:  Enzymatic Nucleic Acid
acaugaggcugaugaggccguuaggccgaaaaacauag

SEQ ID NO: 2659 - RNA, 38 nt, Artificial Sequence
  Description of Artificial Sequence:  Enzymatic Nucleic Acid
agcaacaucugaugaggccguuaggccgaaagggaaac

SEQ ID NO: 2660 - RNA, 38 nt, Artificial Sequence
  Description of Artificial Sequence:  Enzymatic Nucleic Acid
uguacagccugaugaggccguuaggccgaaacaugagg

SEQ ID NO: 2661 - RNA, 38 nt, Artificial Sequence
  Description of Artificial Sequence:  Enzymatic Nucleic Acid
agguuuugcugaugaggccguuaggccgaaacagcaac

SEQ ID NO: 2662 - RNA, 38 nt, Artificial Sequence
  Description of Artificial Sequence:  Enzymatic Nucleic Acid
uccguccgcugaugaggccguuaggccgaaagguuuug

SEQ ID NO: 2663 - RNA, 38 nt, Artificial Sequence
  Description of Artificial Sequence:  Enzymatic Nucleic Acid
gaugggaacugaugaggccguuaggccgaaacaggugc

SEQ ID NO: 2664 - RNA, 38 nt, Artificial Sequence
  Description of Artificial Sequence:  Enzymatic Nucleic Acid
gggaugggcugaugaggccguuaggccgaaauacaggu

SEQ ID NO: 2665 - RNA, 38 nt, Artificial Sequence
  Description of Artificial Sequence:  Enzymatic Nucleic Acid
ugggauggcugaugaggccguuaggccgaaaauacagg

SEQ ID NO: 2666 - RNA, 38 nt, Artificial Sequence
  Description of Artificial Sequence:  Enzymatic Nucleic Acid
gaugauggcugaugaggccguuaggccgaaaugggaau

SEQ ID NO: 2667 - RNA, 38 nt, Artificial Sequence
  Description of Artificial Sequence:  Enzymatic Nucleic Acid
cccaagaucugaugaggccguuaggccgaaaugggaug

SEQ ID NO: 2668 - RNA, 38 nt, Artificial Sequence
  Description of Artificial Sequence:  Enzymatic Nucleic Acid
aagcccaacugaugaggccguuaggccgaaaugauggg

SEQ ID NO: 2669 - RNA, 38 nt, Artificial Sequence
  Description of Artificial Sequence:  Enzymatic Nucleic Acid
gaaagccccugaugaggccguuaggccgaaagaugaug

SEQ ID NO: 2670 - RNA, 38 nt, Artificial Sequence
  Description of Artificial Sequence:  Enzymatic Nucleic Acid
uuuugcgacugaugaggccguuaggccgaaagcccaag

SEQ ID NO: 2671 - RNA, 38 nt, Artificial Sequence
  Description of Artificial Sequence:  Enzymatic Nucleic Acid
auuuugcgcugaugaggccguuaggccgaaaagcccaa

SEQ ID NO: 2672 - RNA, 38 nt, Artificial Sequence
  Description of Artificial Sequence:  Enzymatic Nucleic Acid
uauuuugccugaugaggccguuaggccgaaaaagccca

SEQ ID NO: 2673 - RNA, 38 nt, Artificial Sequence
  Description of Artificial Sequence:  Enzymatic Nucleic Acid
cccauaggcugaugaggccguuaggccgaaauuuugcg

SEQ ID NO: 2674 - RNA, 38 nt, Artificial Sequence
  Description of Artificial Sequence:  Enzymatic Nucleic Acid
cacucccacugaugaggccguuaggccgaaagguauuu

SEQ ID NO: 2675 - RNA, 38 nt, Artificial Sequence
  Description of Artificial Sequence:  Enzymatic Nucleic Acid
aacggacucugaugaggccguuaggccgaaaggcccac

SEQ ID NO: 2676 - RNA, 38 nt, Artificial Sequence
  Description of Artificial Sequence:  Enzymatic Nucleic Acid
gagaaacgcugaugaggccguuaggccgaaacugaggc

SEQ ID NO: 2677 - RNA, 38 nt, Artificial Sequence
  Description of Artificial Sequence:  Enzymatic Nucleic Acid
ccaagagacugaugaggccguuaggccgaaacggacug

SEQ ID NO: 2678 - RNA, 38 nt, Artificial Sequence
  Description of Artificial Sequence:  Enzymatic Nucleic Acid
gccaagagcugaugaggccguuaggccgaaaacggacu

SEQ ID NO: 2679 - RNA, 38 nt, Artificial Sequence
  Description of Artificial Sequence:  Enzymatic Nucleic Acid
agccaagacugaugaggccguuaggccgaaaaacggac

SEQ ID NO: 2680 - RNA, 38 nt, Artificial Sequence
  Description of Artificial Sequence:  Enzymatic Nucleic Acid
ugagccaacugaugaggccguuaggccgaaagaaacgg

SEQ ID NO: 2681 - RNA, 38 nt, Artificial Sequence
  Description of Artificial Sequence:  Enzymatic Nucleic Acid
acugagcccugaugaggccguuaggccgaaagagaaac

SEQ ID NO: 2682 - RNA, 38 nt, Artificial Sequence
  Description of Artificial Sequence:  Enzymatic Nucleic Acid
aguaaacucugaugaggccguuaggccgaaagccaaga

SEQ ID NO: 2683 - RNA, 38 nt, Artificial Sequence
  Description of Artificial Sequence:  Enzymatic Nucleic Acid
cacuaguacugaugaggccguuaggccgaaacugagcc

SEQ ID NO: 2684 - RNA, 38 nt, Artificial Sequence
  Description of Artificial Sequence:  Enzymatic Nucleic Acid
gcacuagucugaugaggccguuaggccgaaaacugagc

SEQ ID NO: 2685 - RNA, 38 nt, Artificial Sequence
  Description of Artificial Sequence:  Enzymatic Nucleic Acid
ggcacuagcugaugaggccguuaggccgaaaaacugag

SEQ ID NO: 2686 - RNA, 38 nt, Artificial Sequence
  Description of Artificial Sequence:  Enzymatic Nucleic Acid
aauggcaccugaugaggccguuaggccgaaaguaaacu

SEQ ID NO: 2687 - RNA, 38 nt, Artificial Sequence
  Description of Artificial Sequence:  Enzymatic Nucleic Acid
acugaacacugaugaggccguuaggccgaaauggcacu

SEQ ID NO: 2688 - RNA, 38 nt, Artificial Sequence
  Description of Artificial Sequence:  Enzymatic Nucleic Acid
cacugaaccugaugaggccguuaggccgaaaauggcac

SEQ ID NO: 2689 - RNA, 38 nt, Artificial Sequence
  Description of Artificial Sequence:  Enzymatic Nucleic Acid
aaccacugcugaugaggccguuaggccgaaacaaaugg

SEQ ID NO: 2690 - RNA, 38 nt, Artificial Sequence
  Description of Artificial Sequence:  Enzymatic Nucleic Acid
gaaccacucugaugaggccguuaggccgaaaacaaaug

SEQ ID NO: 2691 - RNA, 38 nt, Artificial Sequence
  Description of Artificial Sequence:  Enzymatic Nucleic Acid
gcccuacgcugaugaggccguuaggccgaaaccacuga

SEQ ID NO: 2692 - RNA, 38 nt, Artificial Sequence
  Description of Artificial Sequence:  Enzymatic Nucleic Acid
agcccuaccugaugaggccguuaggccgaaaaccacug

SEQ ID NO: 2693 - RNA, 38 nt, Artificial Sequence
  Description of Artificial Sequence:  Enzymatic Nucleic Acid
gaaagccccugaugaggccguuaggccgaaacgaacca

SEQ ID NO: 2694 - RNA, 38 nt, Artificial Sequence
  Description of Artificial Sequence:  Enzymatic Nucleic Acid
gugggggacugaugaggccguuaggccgaaagcccuac

SEQ ID NO: 2695 - RNA, 38 nt, Artificial Sequence
  Description of Artificial Sequence:  Enzymatic Nucleic Acid
agugggggcugaugaggccguuaggccgaaaagcccua

SEQ ID NO: 2696 - RNA, 38 nt, Artificial Sequence
  Description of Artificial Sequence:  Enzymatic Nucleic Acid
caguggggcugaugaggccguuaggccgaaaaagcccu

SEQ ID NO: 2697 - RNA, 38 nt, Artificial Sequence
  Description of Artificial Sequence:  Enzymatic Nucleic Acid
gaaagccacugaugaggccguuaggccgaaacaguggg

SEQ ID NO: 2698 - RNA, 38 nt, Artificial Sequence
  Description of Artificial Sequence:  Enzymatic Nucleic Acid
auaacugacugaugaggccguuaggccgaaagccagac

SEQ ID NO: 2699 - RNA, 38 nt, Artificial Sequence
  Description of Artificial Sequence:  Enzymatic Nucleic Acid
uauaacugcugaugaggccguuaggccgaaaagccaga

SEQ ID NO: 2700 - RNA, 38 nt, Artificial Sequence
  Description of Artificial Sequence:  Enzymatic Nucleic Acid
auauaacucugaugaggccguuaggccgaaaaagccag

SEQ ID NO: 2701 - RNA, 38 nt, Artificial Sequence
  Description of Artificial Sequence:  Enzymatic Nucleic Acid
auccauaucugaugaggccguuaggccgaaacugaaag

SEQ ID NO: 2702 - RNA, 38 nt, Artificial Sequence
  Description of Artificial Sequence:  Enzymatic Nucleic Acid
cauccauacugaugaggccguuaggccgaaaacugaaa

SEQ ID NO: 2703 - RNA, 38 nt, Artificial Sequence
  Description of Artificial Sequence:  Enzymatic Nucleic Acid
aucauccacugaugaggccguuaggccgaaauaacuga

SEQ ID NO: 2704 - RNA, 38 nt, Artificial Sequence
  Description of Artificial Sequence:  Enzymatic Nucleic Acid
gcccccaacugaugaggccguuaggccgaaaccacauc

SEQ ID NO: 2705 - RNA, 38 nt, Artificial Sequence
  Description of Artificial Sequence:  Enzymatic Nucleic Acid
ggcccccacugaugaggccguuaggccgaaaaccacau

SEQ ID NO: 2706 - RNA, 38 nt, Artificial Sequence
  Description of Artificial Sequence:  Enzymatic Nucleic Acid
uggccccccugaugaggccguuaggccgaaaaaccaca

SEQ ID NO: 2707 - RNA, 38 nt, Artificial Sequence
  Description of Artificial Sequence:  Enzymatic Nucleic Acid
guuguacacugaugaggccguuaggccgaaacuuggcc

SEQ ID NO: 2708 - RNA, 38 nt, Artificial Sequence
  Description of Artificial Sequence:  Enzymatic Nucleic Acid
agauguugcugaugaggccguuaggccgaaacagacuu

SEQ ID NO: 2709 - RNA, 38 nt, Artificial Sequence
  Description of Artificial Sequence:  Enzymatic Nucleic Acid
ggacucaacugaugaggccguuaggccgaaauguugua

SEQ ID NO: 2710 - RNA, 38 nt, Artificial Sequence
  Description of Artificial Sequence:  Enzymatic Nucleic Acid
agggacuccugaugaggccguuaggccgaaagauguug

SEQ ID NO: 2711 - RNA, 38 nt, Artificial Sequence
  Description of Artificial Sequence:  Enzymatic Nucleic Acid
cauaaaggcugaugaggccguuaggccgaaacucaaga

SEQ ID NO: 2712 - RNA, 38 nt, Artificial Sequence
  Description of Artificial Sequence:  Enzymatic Nucleic Acid
gcggcauacugaugaggccguuaggccgaaagggacuc

SEQ ID NO: 2713 - RNA, 38 nt, Artificial Sequence
  Description of Artificial Sequence:  Enzymatic Nucleic Acid
agcggcaucugaugaggccguuaggccgaaaagggacu

SEQ ID NO: 2714 - RNA, 38 nt, Artificial Sequence
  Description of Artificial Sequence:  Enzymatic Nucleic Acid
cagcggcacugaugaggccguuaggccgaaaaagggac

SEQ ID NO: 2715 - RNA, 38 nt, Artificial Sequence
  Description of Artificial Sequence:  Enzymatic Nucleic Acid
aaauuggucugaugaggccguuaggccgaaacagcggc

SEQ ID NO: 2716 - RNA, 38 nt, Artificial Sequence
  Description of Artificial Sequence:  Enzymatic Nucleic Acid
aaaauuggcugaugaggccguuaggccgaaaacagcgg

SEQ ID NO: 2717 - RNA, 38 nt, Artificial Sequence
  Description of Artificial Sequence:  Enzymatic Nucleic Acid
caaaagaacugaugaggccguuaggccgaaauugguaa

SEQ ID NO: 2718 - RNA, 38 nt, Artificial Sequence
  Description of Artificial Sequence:  Enzymatic Nucleic Acid
acaaaagacugaugaggccguuaggccgaaaauuggua

SEQ ID NO: 2719 - RNA, 38 nt, Artificial Sequence
  Description of Artificial Sequence:  Enzymatic Nucleic Acid
gacaaaagcugaugaggccguuaggccgaaaaauuggu

SEQ ID NO: 2720 - RNA, 38 nt, Artificial Sequence
  Description of Artificial Sequence:  Enzymatic Nucleic Acid
agacaaaacugaugaggccguuaggccgaaaaaauugg

SEQ ID NO: 2721 - RNA, 38 nt, Artificial Sequence
  Description of Artificial Sequence:  Enzymatic Nucleic Acid
aaagacaacugaugaggccguuaggccgaaagaaaauu

SEQ ID NO: 2722 - RNA, 38 nt, Artificial Sequence
  Description of Artificial Sequence:  Enzymatic Nucleic Acid
caaagacacugaugaggccguuaggccgaaaagaaaau

SEQ ID NO: 2723 - RNA, 38 nt, Artificial Sequence
  Description of Artificial Sequence:  Enzymatic Nucleic Acid
ccaaagaccugaugaggccguuaggccgaaaaagaaaa

SEQ ID NO: 2724 - RNA, 38 nt, Artificial Sequence
  Description of Artificial Sequence:  Enzymatic Nucleic Acid
uacccaaacugaugaggccguuaggccgaaacaaaaga

SEQ ID NO: 2725 - RNA, 38 nt, Artificial Sequence
  Description of Artificial Sequence:  Enzymatic Nucleic Acid
uauacccacugaugaggccguuaggccgaaagacaaaa

SEQ ID NO: 2726 - RNA, 38 nt, Artificial Sequence
  Description of Artificial Sequence:  Enzymatic Nucleic Acid
guauaccccugaugaggccguuaggccgaaaagacaaa

SEQ ID NO: 2727 - RNA, 38 nt, Artificial Sequence
  Description of Artificial Sequence:  Enzymatic Nucleic Acid
uaaauguacugaugaggccguuaggccgaaacccaaag

SEQ ID NO: 2728 - RNA, 38 nt, Artificial Sequence
  Description of Artificial Sequence:  Enzymatic Nucleic Acid
uuuaaaugcugaugaggccguuaggccgaaauacccaa

SEQ ID NO: 2729 - RNA, 38 nt, Artificial Sequence
  Description of Artificial Sequence:  Enzymatic Nucleic Acid
aggguuuacugaugaggccguuaggccgaaauguauac

SEQ ID NO: 2730 - RNA, 38 nt, Artificial Sequence
  Description of Artificial Sequence:  Enzymatic Nucleic Acid
gaggguuucugaugaggccguuaggccgaaaauguaua

SEQ ID NO: 2731 - RNA, 38 nt, Artificial Sequence
  Description of Artificial Sequence:  Enzymatic Nucleic Acid
ugaggguucugaugaggccguuaggccgaaaaauguau

SEQ ID NO: 2732 - RNA, 38 nt, Artificial Sequence
  Description of Artificial Sequence:  Enzymatic Nucleic Acid
uguuuugucugaugaggccguuaggccgaaaggguuua

SEQ ID NO: 2733 - RNA, 38 nt, Artificial Sequence
  Description of Artificial Sequence:  Enzymatic Nucleic Acid
uaagggaacugaugaggccguuaggccgaaauccccau

SEQ ID NO: 2734 - RNA, 38 nt, Artificial Sequence
  Description of Artificial Sequence:  Enzymatic Nucleic Acid
guuaagggcugaugaggccguuaggccgaaauaucccc

SEQ ID NO: 2735 - RNA, 38 nt, Artificial Sequence
  Description of Artificial Sequence:  Enzymatic Nucleic Acid
aguuaaggcugaugaggccguuaggccgaaaauauccc

SEQ ID NO: 2736 - RNA, 38 nt, Artificial Sequence
  Description of Artificial Sequence:  Enzymatic Nucleic Acid
augaaguucugaugaggccguuaggccgaaagggaaua

SEQ ID NO: 2737 - RNA, 38 nt, Artificial Sequence
  Description of Artificial Sequence:  Enzymatic Nucleic Acid
caugaagucugaugaggccguuaggccgaaaagggaau

SEQ ID NO: 2738 - RNA, 38 nt, Artificial Sequence
  Description of Artificial Sequence:  Enzymatic Nucleic Acid
aucccaugcugaugaggccguuaggccgaaaguuaagg

SEQ ID NO: 2739 - RNA, 38 nt, Artificial Sequence
  Description of Artificial Sequence:  Enzymatic Nucleic Acid
uaucccaucugaugaggccguuaggccgaaaaguuaag

SEQ ID NO: 2740 - RNA, 38 nt, Artificial Sequence
  Description of Artificial Sequence:  Enzymatic Nucleic Acid
caauuacacugaugaggccguuaggccgaaaucccaug

SEQ ID NO: 2741 - RNA, 38 nt, Artificial Sequence
  Description of Artificial Sequence:  Enzymatic Nucleic Acid
cucccaaucugaugaggccguuaggccgaaacauaucc

SEQ ID NO: 2742 - RNA, 38 nt, Artificial Sequence
  Description of Artificial Sequence:  Enzymatic Nucleic Acid
caacuccccugaugaggccguuaggccgaaauuacaua

SEQ ID NO: 2743 - RNA, 38 nt, Artificial Sequence
  Description of Artificial Sequence:  Enzymatic Nucleic Acid
ugugcccccugaugaggccguuaggccgaaacucccaa

SEQ ID NO: 2744 - RNA, 38 nt, Artificial Sequence
  Description of Artificial Sequence:  Enzymatic Nucleic Acid
ccuguggccugaugaggccguuaggccgaaaugugccc

SEQ ID NO: 2745 - RNA, 38 nt, Artificial Sequence
  Description of Artificial Sequence:  Enzymatic Nucleic Acid
uuguacaacugaugaggccguuaggccgaaauguuccu

SEQ ID NO: 2746 - RNA, 38 nt, Artificial Sequence
  Description of Artificial Sequence:  Enzymatic Nucleic Acid
uuuuguaccugaugaggccguuaggccgaaauauguuc

SEQ ID NO: 2747 - RNA, 38 nt, Artificial Sequence
  Description of Artificial Sequence:  Enzymatic Nucleic Acid
auuuuuugcugaugaggccguuaggccgaaacaauaug

SEQ ID NO: 2748 - RNA, 38 nt, Artificial Sequence
  Description of Artificial Sequence:  Enzymatic Nucleic Acid
cacauuuucugaugaggccguuaggccgaaauuuuuug

SEQ ID NO: 2749 - RNA, 38 nt, Artificial Sequence
  Description of Artificial Sequence:  Enzymatic Nucleic Acid
uuuccuaacugaugaggccguuaggccgaaacacauuu

SEQ ID NO: 2750 - RNA, 38 nt, Artificial Sequence
  Description of Artificial Sequence:  Enzymatic Nucleic Acid
guuuccuacugaugaggccguuaggccgaaaacacauu

SEQ ID NO: 2751 - RNA, 38 nt, Artificial Sequence
  Description of Artificial Sequence:  Enzymatic Nucleic Acid
aguuuccucugaugaggccguuaggccgaaaaacacau

SEQ ID NO: 2752 - RNA, 38 nt, Artificial Sequence
  Description of Artificial Sequence:  Enzymatic Nucleic Acid
aaguuucccugaugaggccguuaggccgaaaaaacaca

SEQ ID NO: 2753 - RNA, 38 nt, Artificial Sequence
  Description of Artificial Sequence:  Enzymatic Nucleic Acid
uuuacaggcugaugaggccguuaggccgaaaguuuccu

SEQ ID NO: 2754 - RNA, 38 nt, Artificial Sequence
  Description of Artificial Sequence:  Enzymatic Nucleic Acid
guuuacagcugaugaggccguuaggccgaaaaguuucc

SEQ ID NO: 2755 - RNA, 38 nt, Artificial Sequence
  Description of Artificial Sequence:  Enzymatic Nucleic Acid
ggccuguucugaugaggccguuaggccgaaacaggaag

SEQ ID NO: 2756 - RNA, 38 nt, Artificial Sequence
  Description of Artificial Sequence:  Enzymatic Nucleic Acid
ccaaucaacugaugaggccguuaggccgaaaggccugu

SEQ ID NO: 2757 - RNA, 38 nt, Artificial Sequence
  Description of Artificial Sequence:  Enzymatic Nucleic Acid
uuccaauccugaugaggccguuaggccgaaauaggccu

SEQ ID NO: 2758 - RNA, 38 nt, Artificial Sequence
  Description of Artificial Sequence:  Enzymatic Nucleic Acid
uacuuucccugaugaggccguuaggccgaaaucaauag

SEQ ID NO: 2759 - RNA, 38 nt, Artificial Sequence
  Description of Artificial Sequence:  Enzymatic Nucleic Acid
cguugacacugaugaggccguuaggccgaaacuuucca

SEQ ID NO: 2760 - RNA, 38 nt, Artificial Sequence
  Description of Artificial Sequence:  Enzymatic Nucleic Acid
aauucguucugaugaggccguuaggccgaaacauacuu

SEQ ID NO: 2761 - RNA, 38 nt, Artificial Sequence
  Description of Artificial Sequence:  Enzymatic Nucleic Acid
agacccaccugaugaggccguuaggccgaaauucguug

SEQ ID NO: 2762 - RNA, 38 nt, Artificial Sequence
  Description of Artificial Sequence:  Enzymatic Nucleic Acid
ccccaaaacugaugaggccguuaggccgaaacccacaa

SEQ ID NO: 2763 - RNA, 38 nt, Artificial Sequence
  Description of Artificial Sequence:  Enzymatic Nucleic Acid
aaccccaacugaugaggccguuaggccgaaagacccac

SEQ ID NO: 2764 - RNA, 38 nt, Artificial Sequence
  Description of Artificial Sequence:  Enzymatic Nucleic Acid
aaaccccacugaugaggccguuaggccgaaaagaccca

SEQ ID NO: 2765 - RNA, 38 nt, Artificial Sequence
  Description of Artificial Sequence:  Enzymatic Nucleic Acid
caaacccccugaugaggccguuaggccgaaaaagaccc

SEQ ID NO: 2766 - RNA, 38 nt, Artificial Sequence
  Description of Artificial Sequence:  Enzymatic Nucleic Acid
gggcggcacugaugaggccguuaggccgaaaccccaaa

SEQ ID NO: 2767 - RNA, 38 nt, Artificial Sequence
  Description of Artificial Sequence:  Enzymatic Nucleic Acid
ggggcggccugaugaggccguuaggccgaaaaccccaa

SEQ ID NO: 2768 - RNA, 38 nt, Artificial Sequence
  Description of Artificial Sequence:  Enzymatic Nucleic Acid
uugcgugacugaugaggccguuaggccgaaaggggcgg

SEQ ID NO: 2769 - RNA, 38 nt, Artificial Sequence
  Description of Artificial Sequence:  Enzymatic Nucleic Acid
auugcgugcugaugaggccguuaggccgaaaaggggcg

SEQ ID NO: 2770 - RNA, 38 nt, Artificial Sequence
  Description of Artificial Sequence:  Enzymatic Nucleic Acid
cauugcgucugaugaggccguuaggccgaaaaaggggc

SEQ ID NO: 2771 - RNA, 38 nt, Artificial Sequence
  Description of Artificial Sequence:  Enzymatic Nucleic Acid
aagcagaacugaugaggccguuaggccgaaauccacau

SEQ ID NO: 2772 - RNA, 38 nt, Artificial Sequence
  Description of Artificial Sequence:  Enzymatic Nucleic Acid
uaaagcagcugaugaggccguuaggccgaaauauccac

SEQ ID NO: 2773 - RNA, 38 nt, Artificial Sequence
  Description of Artificial Sequence:  Enzymatic Nucleic Acid
uuaaagcacugaugaggccguuaggccgaaaauaucca

SEQ ID NO: 2774 - RNA, 38 nt, Artificial Sequence
  Description of Artificial Sequence:  Enzymatic Nucleic Acid
aggcauuacugaugaggccguuaggccgaaagcagaau

SEQ ID NO: 2775 - RNA, 38 nt, Artificial Sequence
  Description of Artificial Sequence:  Enzymatic Nucleic Acid
aaggcauucugaugaggccguuaggccgaaaagcagaa

SEQ ID NO: 2776 - RNA, 38 nt, Artificial Sequence
  Description of Artificial Sequence:  Enzymatic Nucleic Acid
aaaggcaucugaugaggccguuaggccgaaaaagcaga

SEQ ID NO: 2777 - RNA, 38 nt, Artificial Sequence
  Description of Artificial Sequence:  Enzymatic Nucleic Acid
ugcauauacugaugaggccguuaggccgaaaggcauua

SEQ ID NO: 2778 - RNA, 38 nt, Artificial Sequence
  Description of Artificial Sequence:  Enzymatic Nucleic Acid
augcauaucugaugaggccguuaggccgaaaaggcauu

SEQ ID NO: 2779 - RNA, 38 nt, Artificial Sequence
  Description of Artificial Sequence:  Enzymatic Nucleic Acid
caugcauacugaugaggccguuaggccgaaaaaggcau

SEQ ID NO: 2780 - RNA, 38 nt, Artificial Sequence
  Description of Artificial Sequence:  Enzymatic Nucleic Acid
ugcaugcacugaugaggccguuaggccgaaauaaaggc

SEQ ID NO: 2781 - RNA, 38 nt, Artificial Sequence
  Description of Artificial Sequence:  Enzymatic Nucleic Acid
uuugcuugcugaugaggccguuaggccgaaaugcaugc

SEQ ID NO: 2782 - RNA, 38 nt, Artificial Sequence
  Description of Artificial Sequence:  Enzymatic Nucleic Acid
gaaaguaacugaugaggccguuaggccgaaagccuguu

SEQ ID NO: 2783 - RNA, 38 nt, Artificial Sequence
  Description of Artificial Sequence:  Enzymatic Nucleic Acid
agaaaguacugaugaggccguuaggccgaaaagccugu

SEQ ID NO: 2784 - RNA, 38 nt, Artificial Sequence
  Description of Artificial Sequence:  Enzymatic Nucleic Acid
gagaaagucugaugaggccguuaggccgaaaaagccug

SEQ ID NO: 2785 - RNA, 38 nt, Artificial Sequence
  Description of Artificial Sequence:  Enzymatic Nucleic Acid
cgagaaagcugaugaggccguuaggccgaaaaaagccu

SEQ ID NO: 2786 - RNA, 38 nt, Artificial Sequence
  Description of Artificial Sequence:  Enzymatic Nucleic Acid
uggcgagacugaugaggccguuaggccgaaaguaaaag

SEQ ID NO: 2787 - RNA, 38 nt, Artificial Sequence
  Description of Artificial Sequence:  Enzymatic Nucleic Acid
uuggcgagcugaugaggccguuaggccgaaaaguaaaa

SEQ ID NO: 2788 - RNA, 38 nt, Artificial Sequence
  Description of Artificial Sequence:  Enzymatic Nucleic Acid
guuggcgacugaugaggccguuaggccgaaaaaguaaa

SEQ ID NO: 2789 - RNA, 38 nt, Artificial Sequence
  Description of Artificial Sequence:  Enzymatic Nucleic Acid
aaguuggccugaugaggccguuaggccgaaagaaagua

SEQ ID NO: 2790 - RNA, 38 nt, Artificial Sequence
  Description of Artificial Sequence:  Enzymatic Nucleic Acid
ggccuugucugaugaggccguuaggccgaaaguuggcg

SEQ ID NO: 2791 - RNA, 38 nt, Artificial Sequence
  Description of Artificial Sequence:  Enzymatic Nucleic Acid
aggccuugcugaugaggccguuaggccgaaaaguuggc

SEQ ID NO: 2792 - RNA, 38 nt, Artificial Sequence
  Description of Artificial Sequence:  Enzymatic Nucleic Acid
uacuuagacugaugaggccguuaggccgaaaggccuug

SEQ ID NO: 2793 - RNA, 38 nt, Artificial Sequence
  Description of Artificial Sequence:  Enzymatic Nucleic Acid
uuacuuagcugaugaggccguuaggccgaaaaggccuu

SEQ ID NO: 2794 - RNA, 38 nt, Artificial Sequence
  Description of Artificial Sequence:  Enzymatic Nucleic Acid
uuuacuuacugaugaggccguuaggccgaaaaaggccu

SEQ ID NO: 2795 - RNA, 38 nt, Artificial Sequence
  Description of Artificial Sequence:  Enzymatic Nucleic Acid
uguuuacucugaugaggccguuaggccgaaagaaaggc

SEQ ID NO: 2796 - RNA, 38 nt, Artificial Sequence
  Description of Artificial Sequence:  Enzymatic Nucleic Acid
auacuguucugaugaggccguuaggccgaaacuuagaa

SEQ ID NO: 2797 - RNA, 38 nt, Artificial Sequence
  Description of Artificial Sequence:  Enzymatic Nucleic Acid
gguucacacugaugaggccguuaggccgaaacuguuua

SEQ ID NO: 2798 - RNA, 38 nt, Artificial Sequence
  Description of Artificial Sequence:  Enzymatic Nucleic Acid
acgggguacugaugaggccguuaggccgaaagguucac

SEQ ID NO: 2799 - RNA, 38 nt, Artificial Sequence
  Description of Artificial Sequence:  Enzymatic Nucleic Acid
aacggggucugaugaggccguuaggccgaaaagguuca

SEQ ID NO: 2800 - RNA, 38 nt, Artificial Sequence
  Description of Artificial Sequence:  Enzymatic Nucleic Acid
caacggggcugaugaggccguuaggccgaaaaagguuc

SEQ ID NO: 2801 - RNA, 38 nt, Artificial Sequence
  Description of Artificial Sequence:  Enzymatic Nucleic Acid
ugccgagccugaugaggccguuaggccgaaacggggua

SEQ ID NO: 2802 - RNA, 38 nt, Artificial Sequence
  Description of Artificial Sequence:  Enzymatic Nucleic Acid
ccguugcccugaugaggccguuaggccgaaagcaacgg

SEQ ID NO: 2803 - RNA, 38 nt, Artificial Sequence
  Description of Artificial Sequence:  Enzymatic Nucleic Acid
uuggcauacugaugaggccguuaggccgaaaccaggcc

SEQ ID NO: 2804 - RNA, 38 nt, Artificial Sequence
  Description of Artificial Sequence:  Enzymatic Nucleic Acid
acuuggcacugaugaggccguuaggccgaaagaccagg

SEQ ID NO: 2805 - RNA, 38 nt, Artificial Sequence
  Description of Artificial Sequence:  Enzymatic Nucleic Acid
cgucagcacugaugaggccguuaggccgaaacacuugg

SEQ ID NO: 2806 - RNA, 38 nt, Artificial Sequence
  Description of Artificial Sequence:  Enzymatic Nucleic Acid
gcgucagccugaugaggccguuaggccgaaaacacuug

SEQ ID NO: 2807 - RNA, 38 nt, Artificial Sequence
  Description of Artificial Sequence:  Enzymatic Nucleic Acid
caagcccccugaugaggccguuaggccgaaaccagugg

SEQ ID NO: 2808 - RNA, 38 nt, Artificial Sequence
  Description of Artificial Sequence:  Enzymatic Nucleic Acid
cuauggcccugaugaggccguuaggccgaaagccccaa

SEQ ID NO: 2809 - RNA, 38 nt, Artificial Sequence
  Description of Artificial Sequence:  Enzymatic Nucleic Acid
ugauggcccugaugaggccguuaggccgaaauggccaa

SEQ ID NO: 2810 - RNA, 38 nt, Artificial Sequence
  Description of Artificial Sequence:  Enzymatic Nucleic Acid
caugcgcucugaugaggccguuaggccgaaauggccua

SEQ ID NO: 2811 - RNA, 38 nt, Artificial Sequence
  Description of Artificial Sequence:  Enzymatic Nucleic Acid
gagacacacugaugaggccguuaggccgaaagguucca

SEQ ID NO: 2812 - RNA, 38 nt, Artificial Sequence
  Description of Artificial Sequence:  Enzymatic Nucleic Acid
ggagacaccugaugaggccguuaggccgaaaagguucc

SEQ ID NO: 2813 - RNA, 38 nt, Artificial Sequence
  Description of Artificial Sequence:  Enzymatic Nucleic Acid
gcagaggacugaugaggccguuaggccgaaacacaaag

SEQ ID NO: 2814 - RNA, 38 nt, Artificial Sequence
  Description of Artificial Sequence:  Enzymatic Nucleic Acid
cggcagagcugaugaggccguuaggccgaaagacacaa

SEQ ID NO: 2815 - RNA, 38 nt, Artificial Sequence
  Description of Artificial Sequence:  Enzymatic Nucleic Acid
gaucggcacugaugaggccguuaggccgaaaggagaca

SEQ ID NO: 2816 - RNA, 38 nt, Artificial Sequence
  Description of Artificial Sequence:  Enzymatic Nucleic Acid
gcgguaugcugaugaggccguuaggccgaaaucggcag

SEQ ID NO: 2817 - RNA, 38 nt, Artificial Sequence
  Description of Artificial Sequence:  Enzymatic Nucleic Acid
uuccgcggcugaugaggccguuaggccgaaauggaucg

SEQ ID NO: 2818 - RNA, 38 nt, Artificial Sequence
  Description of Artificial Sequence:  Enzymatic Nucleic Acid
gcggcuagcugaugaggccguuaggccgaaaguuccgc

SEQ ID NO: 2819 - RNA, 38 nt, Artificial Sequence
  Description of Artificial Sequence:  Enzymatic Nucleic Acid
caagcggccugaugaggccguuaggccgaaaggaguuc

SEQ ID NO: 2820 - RNA, 38 nt, Artificial Sequence
  Description of Artificial Sequence:  Enzymatic Nucleic Acid
agcaaaaccugaugaggccguuaggccgaaagcggcua

SEQ ID NO: 2821 - RNA, 38 nt, Artificial Sequence
  Description of Artificial Sequence:  Enzymatic Nucleic Acid
gcgagcaacugaugaggccguuaggccgaaacaagcgg

SEQ ID NO: 2822 - RNA, 38 nt, Artificial Sequence
  Description of Artificial Sequence:  Enzymatic Nucleic Acid
ugcgagcacugaugaggccguuaggccgaaaacaagcg

SEQ ID NO: 2823 - RNA, 38 nt, Artificial Sequence
  Description of Artificial Sequence:  Enzymatic Nucleic Acid
cugcgagccugaugaggccguuaggccgaaaaacaagc

SEQ ID NO: 2824 - RNA, 38 nt, Artificial Sequence
  Description of Artificial Sequence:  Enzymatic Nucleic Acid
ccugcugccugaugaggccguuaggccgaaagcaaaac

SEQ ID NO: 2825 - RNA, 38 nt, Artificial Sequence
  Description of Artificial Sequence:  Enzymatic Nucleic Acid
uugccccacugaugaggccguuaggccgaaaccugcug

SEQ ID NO: 2826 - RNA, 38 nt, Artificial Sequence
  Description of Artificial Sequence:  Enzymatic Nucleic Acid
gucccgaucugaugaggccguuaggccgaaaguuuugc

SEQ ID NO: 2827 - RNA, 38 nt, Artificial Sequence
  Description of Artificial Sequence:  Enzymatic Nucleic Acid
ucaguccccugaugaggccguuaggccgaaaugaguuu

SEQ ID NO: 2828 - RNA, 38 nt, Artificial Sequence
  Description of Artificial Sequence:  Enzymatic Nucleic Acid
cacgacagcugaugaggccguuaggccgaaauugucag

SEQ ID NO: 2829 - RNA, 38 nt, Artificial Sequence
  Description of Artificial Sequence:  Enzymatic Nucleic Acid
gcacgacacugaugaggccguuaggccgaaaauuguca

SEQ ID NO: 2830 - RNA, 38 nt, Artificial Sequence
  Description of Artificial Sequence:  Enzymatic Nucleic Acid
gagagcaccugaugaggccguuaggccgaaacagaauu

SEQ ID NO: 2831 - RNA, 38 nt, Artificial Sequence
  Description of Artificial Sequence:  Enzymatic Nucleic Acid
uugcgggacugaugaggccguuaggccgaaagcacgac

SEQ ID NO: 2832 - RNA, 38 nt, Artificial Sequence
  Description of Artificial Sequence:  Enzymatic Nucleic Acid
auuugcggcugaugaggccguuaggccgaaagagcacg

SEQ ID NO: 2833 - RNA, 38 nt, Artificial Sequence
  Description of Artificial Sequence:  Enzymatic Nucleic Acid
augauguacugaugaggccguuaggccgaaauuugcgg

SEQ ID NO: 2834 - RNA, 38 nt, Artificial Sequence
  Description of Artificial Sequence:  Enzymatic Nucleic Acid
aaaugaugcugaugaggccguuaggccgaaauauuugc

SEQ ID NO: 2835 - RNA, 38 nt, Artificial Sequence
  Description of Artificial Sequence:  Enzymatic Nucleic Acid
auggaaaucugaugaggccguuaggccgaaauguauau

SEQ ID NO: 2836 - RNA, 38 nt, Artificial Sequence
  Description of Artificial Sequence:  Enzymatic Nucleic Acid
gccauggacugaugaggccguuaggccgaaaugaugua

SEQ ID NO: 2837 - RNA, 38 nt, Artificial Sequence
  Description of Artificial Sequence:  Enzymatic Nucleic Acid
agccauggcugaugaggccguuaggccgaaaaugaugu

SEQ ID NO: 2838 - RNA, 38 nt, Artificial Sequence
  Description of Artificial Sequence:  Enzymatic Nucleic Acid
cagccaugcugaugaggccguuaggccgaaaaaugaug

SEQ ID NO: 2839 - RNA, 38 nt, Artificial Sequence
  Description of Artificial Sequence:  Enzymatic Nucleic Acid
gcacagcccugaugaggccguuaggccgaaagcagcca

SEQ ID NO: 2840 - RNA, 38 nt, Artificial Sequence
  Description of Artificial Sequence:  Enzymatic Nucleic Acid
ccgcguagcugaugaggccguuaggccgaaauccaguu

SEQ ID NO: 2841 - RNA, 38 nt, Artificial Sequence
  Description of Artificial Sequence:  Enzymatic Nucleic Acid
gucccgcgcugaugaggccguuaggccgaaaggaucca

SEQ ID NO: 2842 - RNA, 38 nt, Artificial Sequence
  Description of Artificial Sequence:  Enzymatic Nucleic Acid
aaacaaagcugaugaggccguuaggccgaaacgucccg

SEQ ID NO: 2843 - RNA, 38 nt, Artificial Sequence
  Description of Artificial Sequence:  Enzymatic Nucleic Acid
cguaaacacugaugaggccguuaggccgaaaggacguc

SEQ ID NO: 2844 - RNA, 38 nt, Artificial Sequence
  Description of Artificial Sequence:  Enzymatic Nucleic Acid
acguaaaccugaugaggccguuaggccgaaaaggacgu

SEQ ID NO: 2845 - RNA, 38 nt, Artificial Sequence
  Description of Artificial Sequence:  Enzymatic Nucleic Acid
gggacguacugaugaggccguuaggccgaaacaaagga

SEQ ID NO: 2846 - RNA, 38 nt, Artificial Sequence
  Description of Artificial Sequence:  Enzymatic Nucleic Acid
cgggacgucugaugaggccguuaggccgaaaacaaagg

SEQ ID NO: 2847 - RNA, 38 nt, Artificial Sequence
  Description of Artificial Sequence:  Enzymatic Nucleic Acid
acgggacgcugaugaggccguuaggccgaaaaacaaag

SEQ ID NO: 2848 - RNA, 38 nt, Artificial Sequence
  Description of Artificial Sequence:  Enzymatic Nucleic Acid
gccgacggcugaugaggccguuaggccgaaacguaaac

SEQ ID NO: 2849 - RNA, 38 nt, Artificial Sequence
  Description of Artificial Sequence:  Enzymatic Nucleic Acid
ucagcgcccugaugaggccguuaggccgaaacgggacg

SEQ ID NO: 2850 - RNA, 38 nt, Artificial Sequence
  Description of Artificial Sequence:  Enzymatic Nucleic Acid
guccgcggcugaugaggccguuaggccgaaauucagcg

SEQ ID NO: 2851 - RNA, 38 nt, Artificial Sequence
  Description of Artificial Sequence:  Enzymatic Nucleic Acid
ggccccggcugaugaggccguuaggccgaaaggggucg

SEQ ID NO: 2852 - RNA, 38 nt, Artificial Sequence
  Description of Artificial Sequence:  Enzymatic Nucleic Acid
agagcccccugaugaggccguuaggccgaaagcggccc

SEQ ID NO: 2853 - RNA, 38 nt, Artificial Sequence
  Description of Artificial Sequence:  Enzymatic Nucleic Acid
gggcgguacugaugaggccguuaggccgaaagccccaa

SEQ ID NO: 2854 - RNA, 38 nt, Artificial Sequence
  Description of Artificial Sequence:  Enzymatic Nucleic Acid
gcgggcggcugaugaggccguuaggccgaaagagcccc

SEQ ID NO: 2855 - RNA, 38 nt, Artificial Sequence
  Description of Artificial Sequence:  Enzymatic Nucleic Acid
aggcggagcugaugaggccguuaggccgaaagcgggcg

SEQ ID NO: 2856 - RNA, 38 nt, Artificial Sequence
  Description of Artificial Sequence:  Enzymatic Nucleic Acid
uaggcggacugaugaggccguuaggccgaaaagcgggc

SEQ ID NO: 2857 - RNA, 38 nt, Artificial Sequence
  Description of Artificial Sequence:  Enzymatic Nucleic Acid
aauaggcgcugaugaggccguuaggccgaaagaagcgg

SEQ ID NO: 2858 - RNA, 38 nt, Artificial Sequence
  Description of Artificial Sequence:  Enzymatic Nucleic Acid
cgguacaacugaugaggccguuaggccgaaaggcggag

SEQ ID NO: 2859 - RNA, 38 nt, Artificial Sequence
  Description of Artificial Sequence:  Enzymatic Nucleic Acid
gucgguaccugaugaggccguuaggccgaaauaggcgg

SEQ ID NO: 2860 - RNA, 38 nt, Artificial Sequence
  Description of Artificial Sequence:  Enzymatic Nucleic Acid
acggucggcugaugaggccguuaggccgaaacaauagg

SEQ ID NO: 2861 - RNA, 38 nt, Artificial Sequence
  Description of Artificial Sequence:  Enzymatic Nucleic Acid
gccccgugcugaugaggccguuaggccgaaacggucgg

SEQ ID NO: 2862 - RNA, 38 nt, Artificial Sequence
  Description of Artificial Sequence:  Enzymatic Nucleic Acid
cguaaagacugaugaggccguuaggccgaaaggugcgc

SEQ ID NO: 2863 - RNA, 38 nt, Artificial Sequence
  Description of Artificial Sequence:  Enzymatic Nucleic Acid
cgcguaaacugaugaggccguuaggccgaaagaggugc

SEQ ID NO: 2864 - RNA, 38 nt, Artificial Sequence
  Description of Artificial Sequence:  Enzymatic Nucleic Acid
uccgcguacugaugaggccguuaggccgaaagagaggu

SEQ ID NO: 2865 - RNA, 38 nt, Artificial Sequence
  Description of Artificial Sequence:  Enzymatic Nucleic Acid
guccgcgucugaugaggccguuaggccgaaaagagagg

SEQ ID NO: 2866 - RNA, 38 nt, Artificial Sequence
  Description of Artificial Sequence:  Enzymatic Nucleic Acid
aguccgcgcugaugaggccguuaggccgaaaaagagag

SEQ ID NO: 2867 - RNA, 38 nt, Artificial Sequence
  Description of Artificial Sequence:  Enzymatic Nucleic Acid
cagacgggcugaugaggccguuaggccgaaaguccgcg

SEQ ID NO: 2868 - RNA, 38 nt, Artificial Sequence
  Description of Artificial Sequence:  Enzymatic Nucleic Acid
aaggcacacugaugaggccguuaggccgaaacggggag

SEQ ID NO: 2869 - RNA, 38 nt, Artificial Sequence
  Description of Artificial Sequence:  Enzymatic Nucleic Acid
cagaugagcugaugaggccguuaggccgaaaggcacag

SEQ ID NO: 2870 - RNA, 38 nt, Artificial Sequence
  Description of Artificial Sequence:  Enzymatic Nucleic Acid
gcagaugacugaugaggccguuaggccgaaaaggcaca

SEQ ID NO: 2871 - RNA, 38 nt, Artificial Sequence
  Description of Artificial Sequence:  Enzymatic Nucleic Acid
cggcagaucugaugaggccguuaggccgaaagaaggca

SEQ ID NO: 2872 - RNA, 38 nt, Artificial Sequence
  Description of Artificial Sequence:  Enzymatic Nucleic Acid
guccggcacugaugaggccguuaggccgaaaugagaag

SEQ ID NO: 2873 - RNA, 38 nt, Artificial Sequence
  Description of Artificial Sequence:  Enzymatic Nucleic Acid
gugaagcgcugaugaggccguuaggccgaaagugcaca

SEQ ID NO: 2874 - RNA, 38 nt, Artificial Sequence
  Description of Artificial Sequence:  Enzymatic Nucleic Acid
ggugaagccugaugaggccguuaggccgaaaagugcac

SEQ ID NO: 2875 - RNA, 38 nt, Artificial Sequence
  Description of Artificial Sequence:  Enzymatic Nucleic Acid
cagaggugcugaugaggccguuaggccgaaagcgaagu

SEQ ID NO: 2876 - RNA, 38 nt, Artificial Sequence
  Description of Artificial Sequence:  Enzymatic Nucleic Acid
gcagaggucugaugaggccguuaggccgaaaagcgaag

SEQ ID NO: 2877 - RNA, 38 nt, Artificial Sequence
  Description of Artificial Sequence:  Enzymatic Nucleic Acid
gacgugcacugaugaggccguuaggccgaaaggugaag

SEQ ID NO: 2878 - RNA, 38 nt, Artificial Sequence
  Description of Artificial Sequence:  Enzymatic Nucleic Acid
cuccaugccugaugaggccguuaggccgaaacgugcag

SEQ ID NO: 2879 - RNA, 38 nt, Artificial Sequence
  Description of Artificial Sequence:  Enzymatic Nucleic Acid
uuaugcaacugaugaggccguuaggccgaaaccuuggg

SEQ ID NO: 2880 - RNA, 38 nt, Artificial Sequence
  Description of Artificial Sequence:  Enzymatic Nucleic Acid
ucuuaugccugaugaggccguuaggccgaaagaccuug

SEQ ID NO: 2881 - RNA, 38 nt, Artificial Sequence
  Description of Artificial Sequence:  Enzymatic Nucleic Acid
aguccucucugaugaggccguuaggccgaaaugcaaga

SEQ ID NO: 2882 - RNA, 38 nt, Artificial Sequence
  Description of Artificial Sequence:  Enzymatic Nucleic Acid
aaguccaacugaugaggccguuaggccgaaaguccucu

SEQ ID NO: 2883 - RNA, 38 nt, Artificial Sequence
  Description of Artificial Sequence:  Enzymatic Nucleic Acid
gaaagucccugaugaggccguuaggccgaaagaguccu

SEQ ID NO: 2884 - RNA, 38 nt, Artificial Sequence
  Description of Artificial Sequence:  Enzymatic Nucleic Acid
auugcugacugaugaggccguuaggccgaaaguccaag

SEQ ID NO: 2885 - RNA, 38 nt, Artificial Sequence
  Description of Artificial Sequence:  Enzymatic Nucleic Acid
cauugcugcugaugaggccguuaggccgaaaaguccaa

SEQ ID NO: 2886 - RNA, 38 nt, Artificial Sequence
  Description of Artificial Sequence:  Enzymatic Nucleic Acid
acauugcucugaugaggccguuaggccgaaaaagucca

SEQ ID NO: 2887 - RNA, 38 nt, Artificial Sequence
  Description of Artificial Sequence:  Enzymatic Nucleic Acid
cggucguucugaugaggccguuaggccgaaacauugcu

SEQ ID NO: 2888 - RNA, 38 nt, Artificial Sequence
  Description of Artificial Sequence:  Enzymatic Nucleic Acid
uaugccuccugaugaggccguuaggccgaaaggucggu

SEQ ID NO: 2889 - RNA, 38 nt, Artificial Sequence
  Description of Artificial Sequence:  Enzymatic Nucleic Acid
cuuugaagcugaugaggccguuaggccgaaaugccuca

SEQ ID NO: 2890 - RNA, 38 nt, Artificial Sequence
  Description of Artificial Sequence:  Enzymatic Nucleic Acid
agucuuugcugaugaggccguuaggccgaaaguaugcc

SEQ ID NO: 2891 - RNA, 38 nt, Artificial Sequence
  Description of Artificial Sequence:  Enzymatic Nucleic Acid
cagucuuucugaugaggccguuaggccgaaaaguaugc

SEQ ID NO: 2892 - RNA, 38 nt, Artificial Sequence
  Description of Artificial Sequence:  Enzymatic Nucleic Acid
acucauuacugaugaggccguuaggccgaaacacacag

SEQ ID NO: 2893 - RNA, 38 nt, Artificial Sequence
  Description of Artificial Sequence:  Enzymatic Nucleic Acid
cacucauucugaugaggccguuaggccgaaaacacaca

SEQ ID NO: 2894 - RNA, 38 nt, Artificial Sequence
  Description of Artificial Sequence:  Enzymatic Nucleic Acid
ccacucaucugaugaggccguuaggccgaaaaacacac

SEQ ID NO: 2895 - RNA, 38 nt, Artificial Sequence
  Description of Artificial Sequence:  Enzymatic Nucleic Acid
ccuccccccugaugaggccguuaggccgaaacuccucc

SEQ ID NO: 2896 - RNA, 38 nt, Artificial Sequence
  Description of Artificial Sequence:  Enzymatic Nucleic Acid
uuuaaccucugaugaggccguuaggccgaaaccuccuc

SEQ ID NO: 2897 - RNA, 38 nt, Artificial Sequence
  Description of Artificial Sequence:  Enzymatic Nucleic Acid
cuuuaacccugaugaggccguuaggccgaaaaccuccu

SEQ ID NO: 2898 - RNA, 38 nt, Artificial Sequence
  Description of Artificial Sequence:  Enzymatic Nucleic Acid
agaccuuucugaugaggccguuaggccgaaaccuaacc

SEQ ID NO: 2899 - RNA, 38 nt, Artificial Sequence
  Description of Artificial Sequence:  Enzymatic Nucleic Acid
aagaccuucugaugaggccguuaggccgaaaaccuaac

SEQ ID NO: 2900 - RNA, 38 nt, Artificial Sequence
  Description of Artificial Sequence:  Enzymatic Nucleic Acid
aguacaaacugaugaggccguuaggccgaaaccuuuaa

SEQ ID NO: 2901 - RNA, 38 nt, Artificial Sequence
  Description of Artificial Sequence:  Enzymatic Nucleic Acid
cuaguacacugaugaggccguuaggccgaaagaccuuu

SEQ ID NO: 2902 - RNA, 38 nt, Artificial Sequence
  Description of Artificial Sequence:  Enzymatic Nucleic Acid
ccuaguaccugaugaggccguuaggccgaaaagaccuu

SEQ ID NO: 2903 - RNA, 38 nt, Artificial Sequence
  Description of Artificial Sequence:  Enzymatic Nucleic Acid
ccuccuagcugaugaggccguuaggccgaaacaaagac

SEQ ID NO: 2904 - RNA, 38 nt, Artificial Sequence
  Description of Artificial Sequence:  Enzymatic Nucleic Acid
cagccucccugaugaggccguuaggccgaaaguacaaa

SEQ ID NO: 2905 - RNA, 38 nt, Artificial Sequence
  Description of Artificial Sequence:  Enzymatic Nucleic Acid
uuuaugcccugaugaggccguuaggccgaaacagccuc

SEQ ID NO: 2906 - RNA, 38 nt, Artificial Sequence
  Description of Artificial Sequence:  Enzymatic Nucleic Acid
caccaauucugaugaggccguuaggccgaaaugccuac

SEQ ID NO: 2907 - RNA, 38 nt, Artificial Sequence
  Description of Artificial Sequence:  Enzymatic Nucleic Acid
aacacacccugaugaggccguuaggccgaaauuuaugc

SEQ ID NO: 2908 - RNA, 38 nt, Artificial Sequence
  Description of Artificial Sequence:  Enzymatic Nucleic Acid
ugcuggugcugaugaggccguuaggccgaaacacacca

SEQ ID NO: 2909 - RNA, 38 nt, Artificial Sequence
  Description of Artificial Sequence:  Enzymatic Nucleic Acid
gugcuggucugaugaggccguuaggccgaaaacacacc

SEQ ID NO: 2910 - RNA, 38 nt, Artificial Sequence
  Description of Artificial Sequence:  Enzymatic Nucleic Acid
aggugaaacugaugaggccguuaggccgaaaguugcau

SEQ ID NO: 2911 - RNA, 38 nt, Artificial Sequence
  Description of Artificial Sequence:  Enzymatic Nucleic Acid
gaggugaacugaugaggccguuaggccgaaaaguugca

SEQ ID NO: 2912 - RNA, 38 nt, Artificial Sequence
  Description of Artificial Sequence:  Enzymatic Nucleic Acid
agaggugacugaugaggccguuaggccgaaaaaguugc

SEQ ID NO: 2913 - RNA, 38 nt, Artificial Sequence
  Description of Artificial Sequence:  Enzymatic Nucleic Acid
cagaggugcugaugaggccguuaggccgaaaaaaguug

SEQ ID NO: 2914 - RNA, 38 nt, Artificial Sequence
  Description of Artificial Sequence:  Enzymatic Nucleic Acid
gcagaggucugaugaggccguuaggccgaaaaaaaguu

SEQ ID NO: 2915 - RNA, 38 nt, Artificial Sequence
  Description of Artificial Sequence:  Enzymatic Nucleic Acid
auuaggcacugaugaggccguuaggccgaaaggugaaa

SEQ ID NO: 2916 - RNA, 38 nt, Artificial Sequence
  Description of Artificial Sequence:  Enzymatic Nucleic Acid
gagaugaucugaugaggccguuaggccgaaaggcagag

SEQ ID NO: 2917 - RNA, 38 nt, Artificial Sequence
  Description of Artificial Sequence:  Enzymatic Nucleic Acid
caugagaucugaugaggccguuaggccgaaauuaggca

SEQ ID NO: 2918 - RNA, 38 nt, Artificial Sequence
  Description of Artificial Sequence:  Enzymatic Nucleic Acid
gaacaugacugaugaggccguuaggccgaaaugauuag

SEQ ID NO: 2919 - RNA, 38 nt, Artificial Sequence
  Description of Artificial Sequence:  Enzymatic Nucleic Acid
augaacaucugaugaggccguuaggccgaaagaugauu

SEQ ID NO: 2920 - RNA, 38 nt, Artificial Sequence
  Description of Artificial Sequence:  Enzymatic Nucleic Acid
aggacaugcugaugaggccguuaggccgaaacaugaga

SEQ ID NO: 2921 - RNA, 38 nt, Artificial Sequence
  Description of Artificial Sequence:  Enzymatic Nucleic Acid
uaggacaucugaugaggccguuaggccgaaaacaugag

SEQ ID NO: 2922 - RNA, 38 nt, Artificial Sequence
  Description of Artificial Sequence:  Enzymatic Nucleic Acid
aacaguagcugaugaggccguuaggccgaaacaugaac

SEQ ID NO: 2923 - RNA, 38 nt, Artificial Sequence
  Description of Artificial Sequence:  Enzymatic Nucleic Acid
uugaacagcugaugaggccguuaggccgaaaggacaug

SEQ ID NO: 2924 - RNA, 38 nt, Artificial Sequence
  Description of Artificial Sequence:  Enzymatic Nucleic Acid
gaggcuugcugaugaggccguuaggccgaaacaguagg

SEQ ID NO: 2925 - RNA, 38 nt, Artificial Sequence
  Description of Artificial Sequence:  Enzymatic Nucleic Acid
ggaggcuucugaugaggccguuaggccgaaaacaguag

SEQ ID NO: 2926 - RNA, 38 nt, Artificial Sequence
  Description of Artificial Sequence:  Enzymatic Nucleic Acid
acagcuugcugaugaggccguuaggccgaaaggcuuga

SEQ ID NO: 2927 - RNA, 38 nt, Artificial Sequence
  Description of Artificial Sequence:  Enzymatic Nucleic Acid
agccaccccugaugaggccguuaggccgaaaggcacag

SEQ ID NO: 2928 - RNA, 38 nt, Artificial Sequence
  Description of Artificial Sequence:  Enzymatic Nucleic Acid
augccccacugaugaggccguuaggccgaaagccaccc

SEQ ID NO: 2929 - RNA, 38 nt, Artificial Sequence
  Description of Artificial Sequence:  Enzymatic Nucleic Acid
caugcccccugaugaggccguuaggccgaaaagccacc

SEQ ID NO: 2930 - RNA, 38 nt, Artificial Sequence
  Description of Artificial Sequence:  Enzymatic Nucleic Acid
uacggguccugaugaggccguuaggccgaaauguccau

SEQ ID NO: 2931 - RNA, 38 nt, Artificial Sequence
  Description of Artificial Sequence:  Enzymatic Nucleic Acid
auucuuuacugaugaggccguuaggccgaaacggguca

SEQ ID NO: 2932 - RNA, 38 nt, Artificial Sequence
  Description of Artificial Sequence:  Enzymatic Nucleic Acid
aaauucuucugaugaggccguuaggccgaaauacgggu

SEQ ID NO: 2933 - RNA, 38 nt, Artificial Sequence
  Description of Artificial Sequence:  Enzymatic Nucleic Acid
aagcuccacugaugaggccguuaggccgaaauucuuua

SEQ ID NO: 2934 - RNA, 38 nt, Artificial Sequence
  Description of Artificial Sequence:  Enzymatic Nucleic Acid
gaagcucccugaugaggccguuaggccgaaaauucuuu

SEQ ID NO: 2935 - RNA, 38 nt, Artificial Sequence
  Description of Artificial Sequence:  Enzymatic Nucleic Acid
cuccacagcugaugaggccguuaggccgaaagcuccaa

SEQ ID NO: 2936 - RNA, 38 nt, Artificial Sequence
  Description of Artificial Sequence:  Enzymatic Nucleic Acid
acuccacacugaugaggccguuaggccgaaaagcucca

SEQ ID NO: 2937 - RNA, 38 nt, Artificial Sequence
  Description of Artificial Sequence:  Enzymatic Nucleic Acid
aagagagucugaugaggccguuaggccgaaacuccaca

SEQ ID NO: 2938 - RNA, 38 nt, Artificial Sequence
  Description of Artificial Sequence:  Enzymatic Nucleic Acid
aaagagagcugaugaggccguuaggccgaaaacuccac

SEQ ID NO: 2939 - RNA, 38 nt, Artificial Sequence
  Description of Artificial Sequence:  Enzymatic Nucleic Acid
aaaaaagacugaugaggccguuaggccgaaaguaacuc

SEQ ID NO: 2940 - RNA, 38 nt, Artificial Sequence
  Description of Artificial Sequence:  Enzymatic Nucleic Acid
gcaaaaaacugaugaggccguuaggccgaaagaguaac

SEQ ID NO: 2941 - RNA, 38 nt, Artificial Sequence
  Description of Artificial Sequence:  Enzymatic Nucleic Acid
aggcaaaacugaugaggccguuaggccgaaagagagua

SEQ ID NO: 2942 - RNA, 38 nt, Artificial Sequence
  Description of Artificial Sequence:  Enzymatic Nucleic Acid
aaggcaaacugaugaggccguuaggccgaaaagagagu

SEQ ID NO: 2943 - RNA, 38 nt, Artificial Sequence
  Description of Artificial Sequence:  Enzymatic Nucleic Acid
gaaggcaacugaugaggccguuaggccgaaaaagagag

SEQ ID NO: 2944 - RNA, 38 nt, Artificial Sequence
  Description of Artificial Sequence:  Enzymatic Nucleic Acid
agaaggcacugaugaggccguuaggccgaaaaaagaga

SEQ ID NO: 2945 - RNA, 38 nt, Artificial Sequence
  Description of Artificial Sequence:  Enzymatic Nucleic Acid
cagaaggccugaugaggccguuaggccgaaaaaaagag

SEQ ID NO: 2946 - RNA, 38 nt, Artificial Sequence
  Description of Artificial Sequence:  Enzymatic Nucleic Acid
gaagucagcugaugaggccguuaggccgaaaggcaaaa

SEQ ID NO: 2947 - RNA, 38 nt, Artificial Sequence
  Description of Artificial Sequence:  Enzymatic Nucleic Acid
agaagucacugaugaggccguuaggccgaaaaggcaaa

SEQ ID NO: 2948 - RNA, 38 nt, Artificial Sequence
  Description of Artificial Sequence:  Enzymatic Nucleic Acid
aaggaaagcugaugaggccguuaggccgaaagucagaa

SEQ ID NO: 2949 - RNA, 38 nt, Artificial Sequence
  Description of Artificial Sequence:  Enzymatic Nucleic Acid
gaaggaaacugaugaggccguuaggccgaaaagucaga

SEQ ID NO: 2950 - RNA, 38 nt, Artificial Sequence
  Description of Artificial Sequence:  Enzymatic Nucleic Acid
uagaaggacugaugaggccguuaggccgaaagaaguca

SEQ ID NO: 2951 - RNA, 38 nt, Artificial Sequence
  Description of Artificial Sequence:  Enzymatic Nucleic Acid
auagaaggcugaugaggccguuaggccgaaaagaaguc

SEQ ID NO: 2952 - RNA, 38 nt, Artificial Sequence
  Description of Artificial Sequence:  Enzymatic Nucleic Acid
aauagaagcugaugaggccguuaggccgaaaaagaagu

SEQ ID NO: 2953 - RNA, 38 nt, Artificial Sequence
  Description of Artificial Sequence:  Enzymatic Nucleic Acid
ucgaauagcugaugaggccguuaggccgaaaggaaaga

SEQ ID NO: 2954 - RNA, 38 nt, Artificial Sequence
  Description of Artificial Sequence:  Enzymatic Nucleic Acid
cucgaauacugaugaggccguuaggccgaaaaggaaag

SEQ ID NO: 2955 - RNA, 38 nt, Artificial Sequence
  Description of Artificial Sequence:  Enzymatic Nucleic Acid
aucucgaacugaugaggccguuaggccgaaagaaggaa

SEQ ID NO: 2956 - RNA, 38 nt, Artificial Sequence
  Description of Artificial Sequence:  Enzymatic Nucleic Acid
agaucucgcugaugaggccguuaggccgaaauagaagg

SEQ ID NO: 2957 - RNA, 38 nt, Artificial Sequence
  Description of Artificial Sequence:  Enzymatic Nucleic Acid
gagaucuccugaugaggccguuaggccgaaaauagaag

SEQ ID NO: 2958 - RNA, 38 nt, Artificial Sequence
  Description of Artificial Sequence:  Enzymatic Nucleic Acid
gucgaggacugaugaggccguuaggccgaaaucucgaa

SEQ ID NO: 2959 - RNA, 38 nt, Artificial Sequence
  Description of Artificial Sequence:  Enzymatic Nucleic Acid
gugucgagcugaugaggccguuaggccgaaagaucucg

SEQ ID NO: 2960 - RNA, 38 nt, Artificial Sequence
  Description of Artificial Sequence:  Enzymatic Nucleic Acid
gcgguguccugaugaggccguuaggccgaaaggagauc

SEQ ID NO: 2961 - RNA, 38 nt, Artificial Sequence
  Description of Artificial Sequence:  Enzymatic Nucleic Acid
acagagcacugaugaggccguuaggccgaaaggcggug

SEQ ID NO: 2962 - RNA, 38 nt, Artificial Sequence
  Description of Artificial Sequence:  Enzymatic Nucleic Acid
ccgauacacugaugaggccguuaggccgaaagcagagg

SEQ ID NO: 2963 - RNA, 38 nt, Artificial Sequence
  Description of Artificial Sequence:  Enzymatic Nucleic Acid
ccccccgacugaugaggccguuaggccgaaacagagca

SEQ ID NO: 2964 - RNA, 38 nt, Artificial Sequence
  Description of Artificial Sequence:  Enzymatic Nucleic Acid
ggcccccccugaugaggccguuaggccgaaauacagag

SEQ ID NO: 2965 - RNA, 38 nt, Artificial Sequence
  Description of Artificial Sequence:  Enzymatic Nucleic Acid
gagacucucugaugaggccguuaggccgaaaggccccc

SEQ ID NO: 2966 - RNA, 38 nt, Artificial Sequence
  Description of Artificial Sequence:  Enzymatic Nucleic Acid
ggagacuccugaugaggccguuaggccgaaaaggcccc

SEQ ID NO: 2967 - RNA, 38 nt, Artificial Sequence
  Description of Artificial Sequence:  Enzymatic Nucleic Acid
guuccggacugaugaggccguuaggccgaaacucuaag

SEQ ID NO: 2968 - RNA, 38 nt, Artificial Sequence
  Description of Artificial Sequence:  Enzymatic Nucleic Acid
auguuccgcugaugaggccguuaggccgaaagacucua

SEQ ID NO: 2969 - RNA, 38 nt, Artificial Sequence
  Description of Artificial Sequence:  Enzymatic Nucleic Acid
aggugaaccugaugaggccguuaggccgaaauguuccg

SEQ ID NO: 2970 - RNA, 38 nt, Artificial Sequence
  Description of Artificial Sequence:  Enzymatic Nucleic Acid
gugaggugcugaugaggccguuaggccgaaacaauguu

SEQ ID NO: 2971 - RNA, 38 nt, Artificial Sequence
  Description of Artificial Sequence:  Enzymatic Nucleic Acid
ggugaggucugaugaggccguuaggccgaaaacaaugu

SEQ ID NO: 2972 - RNA, 38 nt, Artificial Sequence
  Description of Artificial Sequence:  Enzymatic Nucleic Acid
cguauggucugaugaggccguuaggccgaaaggugaac

SEQ ID NO: 2973 - RNA, 38 nt, Artificial Sequence
  Description of Artificial Sequence:  Enzymatic Nucleic Acid
gagugccgcugaugaggccguuaggccgaaauggugag

SEQ ID NO: 2974 - RNA, 38 nt, Artificial Sequence
  Description of Artificial Sequence:  Enzymatic Nucleic Acid
gcuugccucugaugaggccguuaggccgaaagugccgu

SEQ ID NO: 2975 - RNA, 38 nt, Artificial Sequence
  Description of Artificial Sequence:  Enzymatic Nucleic Acid
acacagaacugaugaggccguuaggccgaaagcuugcc

SEQ ID NO: 2976 - RNA, 38 nt, Artificial Sequence
  Description of Artificial Sequence:  Enzymatic Nucleic Acid
caacacagcugaugaggccguuaggccgaaauagcuug

SEQ ID NO: 2977 - RNA, 38 nt, Artificial Sequence
  Description of Artificial Sequence:  Enzymatic Nucleic Acid
ccaacacacugaugaggccguuaggccgaaaauagcuu

SEQ ID NO: 2978 - RNA, 38 nt, Artificial Sequence
  Description of Artificial Sequence:  Enzymatic Nucleic Acid
cucacccccugaugaggccguuaggccgaaacacagaa

SEQ ID NO: 2979 - RNA, 38 nt, Artificial Sequence
  Description of Artificial Sequence:  Enzymatic Nucleic Acid
gauucauccugaugaggccguuaggccgaaacucaccc

SEQ ID NO: 2980 - RNA, 38 nt, Artificial Sequence
  Description of Artificial Sequence:  Enzymatic Nucleic Acid
gguggcuacugaugaggccguuaggccgaaauucauca

SEQ ID NO: 2981 - RNA, 38 nt, Artificial Sequence
  Description of Artificial Sequence:  Enzymatic Nucleic Acid
cagguggccugaugaggccguuaggccgaaagauucau

SEQ ID NO: 2982 - RNA, 38 nt, Artificial Sequence
  Description of Artificial Sequence:  Enzymatic Nucleic Acid
uuccaaaucugaugaggccguuaggccgaaacuuccca

SEQ ID NO: 2983 - RNA, 38 nt, Artificial Sequence
  Description of Artificial Sequence:  Enzymatic Nucleic Acid
aucuuccacugaugaggccguuaggccgaaauuacuuc

SEQ ID NO: 2984 - RNA, 38 nt, Artificial Sequence
  Description of Artificial Sequence:  Enzymatic Nucleic Acid
gaucuucccugaugaggccguuaggccgaaaauuacuu

SEQ ID NO: 2985 - RNA, 38 nt, Artificial Sequence
  Description of Artificial Sequence:  Enzymatic Nucleic Acid
ggaugcugcugaugaggccguuaggccgaaaucuucca

SEQ ID NO: 2986 - RNA, 38 nt, Artificial Sequence
  Description of Artificial Sequence:  Enzymatic Nucleic Acid
auucccugcugaugaggccguuaggccgaaaugcugga

SEQ ID NO: 2987 - RNA, 38 nt, Artificial Sequence
  Description of Artificial Sequence:  Enzymatic Nucleic Acid
ugacuacucugaugaggccguuaggccgaaauucccug

SEQ ID NO: 2988 - RNA, 38 nt, Artificial Sequence
  Description of Artificial Sequence:  Enzymatic Nucleic Acid
cugacuaccugaugaggccguuaggccgaaaauucccu

SEQ ID NO: 2989 - RNA, 38 nt, Artificial Sequence
  Description of Artificial Sequence:  Enzymatic Nucleic Acid
uagcugaccugaugaggccguuaggccgaaacuaauuc

SEQ ID NO: 2990 - RNA, 38 nt, Artificial Sequence
  Description of Artificial Sequence:  Enzymatic Nucleic Acid
acauagcucugaugaggccguuaggccgaaacuacuaa

SEQ ID NO: 2991 - RNA, 38 nt, Artificial Sequence
  Description of Artificial Sequence:  Enzymatic Nucleic Acid
cguugacacugaugaggccguuaggccgaaagcugacu

SEQ ID NO: 2992 - RNA, 38 nt, Artificial Sequence
  Description of Artificial Sequence:  Enzymatic Nucleic Acid
uuaacguucugaugaggccguuaggccgaaacauagcu

SEQ ID NO: 2993 - RNA, 38 nt, Artificial Sequence
  Description of Artificial Sequence:  Enzymatic Nucleic Acid
cccauauucugaugaggccguuaggccgaaacguugac

SEQ ID NO: 2994 - RNA, 38 nt, Artificial Sequence
  Description of Artificial Sequence:  Enzymatic Nucleic Acid
gcccauaucugaugaggccguuaggccgaaaacguuga

SEQ ID NO: 2995 - RNA, 38 nt, Artificial Sequence
  Description of Artificial Sequence:  Enzymatic Nucleic Acid
uaggcccacugaugaggccguuaggccgaaauuaacgu

SEQ ID NO: 2996 - RNA, 38 nt, Artificial Sequence
  Description of Artificial Sequence:  Enzymatic Nucleic Acid
cugauuuucugaugaggccguuaggccgaaaggcccau

SEQ ID NO: 2997 - RNA, 38 nt, Artificial Sequence
  Description of Artificial Sequence:  Enzymatic Nucleic Acid
aguugucucugaugaggccguuaggccgaaauuuuuag

SEQ ID NO: 2998 - RNA, 38 nt, Artificial Sequence
  Description of Artificial Sequence:  Enzymatic Nucleic Acid
aaccacaacugaugaggccguuaggccgaaaguugucu

SEQ ID NO: 2999 - RNA, 38 nt, Artificial Sequence
  Description of Artificial Sequence:  Enzymatic Nucleic Acid
gaaaccaccugaugaggccguuaggccgaaauaguugu

SEQ ID NO: 3000 - RNA, 38 nt, Artificial Sequence
  Description of Artificial Sequence:  Enzymatic Nucleic Acid
aaaugugacugaugaggccguuaggccgaaaccacaau

SEQ ID NO: 3001 - RNA, 38 nt, Artificial Sequence
  Description of Artificial Sequence:  Enzymatic Nucleic Acid
gaaaugugcugaugaggccguuaggccgaaaaccacaa

SEQ ID NO: 3002 - RNA, 38 nt, Artificial Sequence
  Description of Artificial Sequence:  Enzymatic Nucleic Acid
ggaaaugucugaugaggccguuaggccgaaaaaccaca

SEQ ID NO: 3003 - RNA, 38 nt, Artificial Sequence
  Description of Artificial Sequence:  Enzymatic Nucleic Acid
agacaggacugaugaggccguuaggccgaaaugugaaa

SEQ ID NO: 3004 - RNA, 38 nt, Artificial Sequence
  Description of Artificial Sequence:  Enzymatic Nucleic Acid
aagacaggcugaugaggccguuaggccgaaaaugugaa

SEQ ID NO: 3005 - RNA, 38 nt, Artificial Sequence
  Description of Artificial Sequence:  Enzymatic Nucleic Acid
uaagacagcugaugaggccguuaggccgaaaaauguga

SEQ ID NO: 3006 - RNA, 38 nt, Artificial Sequence
  Description of Artificial Sequence:  Enzymatic Nucleic Acid
aaaaguaacugaugaggccguuaggccgaaacaggaaa

SEQ ID NO: 3007 - RNA, 38 nt, Artificial Sequence
  Description of Artificial Sequence:  Enzymatic Nucleic Acid
ccaaaagucugaugaggccguuaggccgaaagacagga

SEQ ID NO: 3008 - RNA, 38 nt, Artificial Sequence
  Description of Artificial Sequence:  Enzymatic Nucleic Acid
cccaaaagcugaugaggccguuaggccgaaaagacagg

SEQ ID NO: 3009 - RNA, 38 nt, Artificial Sequence
  Description of Artificial Sequence:  Enzymatic Nucleic Acid
ucgcccaacugaugaggccguuaggccgaaaguaagac

SEQ ID NO: 3010 - RNA, 38 nt, Artificial Sequence
  Description of Artificial Sequence:  Enzymatic Nucleic Acid
cucgcccacugaugaggccguuaggccgaaaaguaaga

SEQ ID NO: 3011 - RNA, 38 nt, Artificial Sequence
  Description of Artificial Sequence:  Enzymatic Nucleic Acid
ucucgccccugaugaggccguuaggccgaaaaaguaag

SEQ ID NO: 3012 - RNA, 38 nt, Artificial Sequence
  Description of Artificial Sequence:  Enzymatic Nucleic Acid
uauucaagcugaugaggccguuaggccgaaacaguuuc

SEQ ID NO: 3013 - RNA, 38 nt, Artificial Sequence
  Description of Artificial Sequence:  Enzymatic Nucleic Acid
auauucaacugaugaggccguuaggccgaaaacaguuu

SEQ ID NO: 3014 - RNA, 38 nt, Artificial Sequence
  Description of Artificial Sequence:  Enzymatic Nucleic Acid
aaauauuccugaugaggccguuaggccgaaagaacagu

SEQ ID NO: 3015 - RNA, 38 nt, Artificial Sequence
  Description of Artificial Sequence:  Enzymatic Nucleic Acid
acaccaaacugaugaggccguuaggccgaaauucaaga

SEQ ID NO: 3016 - RNA, 38 nt, Artificial Sequence
  Description of Artificial Sequence:  Enzymatic Nucleic Acid
agacaccacugaugaggccguuaggccgaaauauucaa

SEQ ID NO: 3017 - RNA, 38 nt, Artificial Sequence
  Description of Artificial Sequence:  Enzymatic Nucleic Acid
aagacacccugaugaggccguuaggccgaaaauauuca

SEQ ID NO: 3018 - RNA, 38 nt, Artificial Sequence
  Description of Artificial Sequence:  Enzymatic Nucleic Acid
cuccaaaacugaugaggccguuaggccgaaacaccaaa

SEQ ID NO: 3019 - RNA, 38 nt, Artificial Sequence
  Description of Artificial Sequence:  Enzymatic Nucleic Acid
cacuccaacugaugaggccguuaggccgaaagacacca

SEQ ID NO: 3020 - RNA, 38 nt, Artificial Sequence
  Description of Artificial Sequence:  Enzymatic Nucleic Acid
acacuccacugaugaggccguuaggccgaaaagacacc

SEQ ID NO: 3021 - RNA, 38 nt, Artificial Sequence
  Description of Artificial Sequence:  Enzymatic Nucleic Acid
cacacucccugaugaggccguuaggccgaaaaagacac

SEQ ID NO: 3022 - RNA, 38 nt, Artificial Sequence
  Description of Artificial Sequence:  Enzymatic Nucleic Acid
ggagugcgcugaugaggccguuaggccgaaauccacac

SEQ ID NO: 3023 - RNA, 38 nt, Artificial Sequence
  Description of Artificial Sequence:  Enzymatic Nucleic Acid
aggagugccugaugaggccguuaggccgaaaauccaca

SEQ ID NO: 3024 - RNA, 38 nt, Artificial Sequence
  Description of Artificial Sequence:  Enzymatic Nucleic Acid
ugcaggagcugaugaggccguuaggccgaaagugcgaa

SEQ ID NO: 3025 - RNA, 38 nt, Artificial Sequence
  Description of Artificial Sequence:  Enzymatic Nucleic Acid
auaugcagcugaugaggccguuaggccgaaaggagugc

SEQ ID NO: 3026 - RNA, 38 nt, Artificial Sequence
  Description of Artificial Sequence:  Enzymatic Nucleic Acid
guggucuacugaugaggccguuaggccgaaaugcagga

SEQ ID NO: 3027 - RNA, 38 nt, Artificial Sequence
  Description of Artificial Sequence:  Enzymatic Nucleic Acid
uggugguccugaugaggccguuaggccgaaauaugcag

SEQ ID NO: 3028 - RNA, 38 nt, Artificial Sequence
  Description of Artificial Sequence:  Enzymatic Nucleic Acid
ugauaagacugaugaggccguuaggccgaaaggggcau

SEQ ID NO: 3029 - RNA, 38 nt, Artificial Sequence
  Description of Artificial Sequence:  Enzymatic Nucleic Acid
guugauaacugaugaggccguuaggccgaaauaggggc

SEQ ID NO: 3030 - RNA, 38 nt, Artificial Sequence
  Description of Artificial Sequence:  Enzymatic Nucleic Acid
guguugaucugaugaggccguuaggccgaaagauaggg

SEQ ID NO: 3031 - RNA, 38 nt, Artificial Sequence
  Description of Artificial Sequence:  Enzymatic Nucleic Acid
aguguugacugaugaggccguuaggccgaaaagauagg

SEQ ID NO: 3032 - RNA, 38 nt, Artificial Sequence
  Description of Artificial Sequence:  Enzymatic Nucleic Acid
gaaguguucugaugaggccguuaggccgaaauaagaua

SEQ ID NO: 3033 - RNA, 38 nt, Artificial Sequence
  Description of Artificial Sequence:  Enzymatic Nucleic Acid
guuuccggcugaugaggccguuaggccgaaaguguuga

SEQ ID NO: 3034 - RNA, 38 nt, Artificial Sequence
  Description of Artificial Sequence:  Enzymatic Nucleic Acid
aguuuccgcugaugaggccguuaggccgaaaaguguug

SEQ ID NO: 3035 - RNA, 38 nt, Artificial Sequence
  Description of Artificial Sequence:  Enzymatic Nucleic Acid
aacaacagcugaugaggccguuaggccgaaaguuuccg

SEQ ID NO: 3036 - RNA, 38 nt, Artificial Sequence
  Description of Artificial Sequence:  Enzymatic Nucleic Acid
cgucuaaccugaugaggccguuaggccgaaacaguagu

SEQ ID NO: 3037 - RNA, 38 nt, Artificial Sequence
  Description of Artificial Sequence:  Enzymatic Nucleic Acid
cuucgucucugaugaggccguuaggccgaaacaacagu

SEQ ID NO: 3038 - RNA, 38 nt, Artificial Sequence
  Description of Artificial Sequence:  Enzymatic Nucleic Acid
ucuucguccugaugaggccguuaggccgaaaacaacag

SEQ ID NO: 3039 - RNA, 38 nt, Artificial Sequence
  Description of Artificial Sequence:  Enzymatic Nucleic Acid
uucuagggcugaugaggccguuaggccgaaaccugccu

SEQ ID NO: 3040 - RNA, 38 nt, Artificial Sequence
  Description of Artificial Sequence:  Enzymatic Nucleic Acid
ucuucuuccugaugaggccguuaggccgaaaggggacc

SEQ ID NO: 3041 - RNA, 38 nt, Artificial Sequence
  Description of Artificial Sequence:  Enzymatic Nucleic Acid
aggcgaggcugaugaggccguuaggccgaaaguucuuc

SEQ ID NO: 3042 - RNA, 38 nt, Artificial Sequence
  Description of Artificial Sequence:  Enzymatic Nucleic Acid
ugcgaggccugaugaggccguuaggccgaaagggaguu

SEQ ID NO: 3043 - RNA, 38 nt, Artificial Sequence
  Description of Artificial Sequence:  Enzymatic Nucleic Acid
ucgucugccugaugaggccguuaggccgaaaggcgagg

SEQ ID NO: 3044 - RNA, 38 nt, Artificial Sequence
  Description of Artificial Sequence:  Enzymatic Nucleic Acid
gcgauugacugaugaggccguuaggccgaaaccuucgu

SEQ ID NO: 3045 - RNA, 38 nt, Artificial Sequence
  Description of Artificial Sequence:  Enzymatic Nucleic Acid
cggcgauucugaugaggccguuaggccgaaagaccuuc

SEQ ID NO: 3046 - RNA, 38 nt, Artificial Sequence
  Description of Artificial Sequence:  Enzymatic Nucleic Acid
gacgcggccugaugaggccguuaggccgaaauugagac

SEQ ID NO: 3047 - RNA, 38 nt, Artificial Sequence
  Description of Artificial Sequence:  Enzymatic Nucleic Acid
ucuucugccugaugaggccguuaggccgaaacgcggcg

SEQ ID NO: 3048 - RNA, 38 nt, Artificial Sequence
  Description of Artificial Sequence:  Enzymatic Nucleic Acid
gagauugacugaugaggccguuaggccgaaaucuucug

SEQ ID NO: 3049 - RNA, 38 nt, Artificial Sequence
  Description of Artificial Sequence:  Enzymatic Nucleic Acid
ccgagauucugaugaggccguuaggccgaaagaucuuc

SEQ ID NO: 3050 - RNA, 38 nt, Artificial Sequence
  Description of Artificial Sequence:  Enzymatic Nucleic Acid
auucccgacugaugaggccguuaggccgaaauugagau

SEQ ID NO: 3051 - RNA, 38 nt, Artificial Sequence
  Description of Artificial Sequence:  Enzymatic Nucleic Acid
agauuccccugaugaggccguuaggccgaaagauugag

SEQ ID NO: 3052 - RNA, 38 nt, Artificial Sequence
  Description of Artificial Sequence:  Enzymatic Nucleic Acid
aacauugacugaugaggccguuaggccgaaauucccga

SEQ ID NO: 3053 - RNA, 38 nt, Artificial Sequence
  Description of Artificial Sequence:  Enzymatic Nucleic Acid
cuaacauucugaugaggccguuaggccgaaagauuccc

SEQ ID NO: 3054 - RNA, 38 nt, Artificial Sequence
  Description of Artificial Sequence:  Enzymatic Nucleic Acid
ggaauacucugaugaggccguuaggccgaaacauugag

SEQ ID NO: 3055 - RNA, 38 nt, Artificial Sequence
  Description of Artificial Sequence:  Enzymatic Nucleic Acid
aggaauaccugaugaggccguuaggccgaaaacauuga

SEQ ID NO: 3056 - RNA, 38 nt, Artificial Sequence
  Description of Artificial Sequence:  Enzymatic Nucleic Acid
ccaaggaacugaugaggccguuaggccgaaacuaacau

SEQ ID NO: 3057 - RNA, 38 nt, Artificial Sequence
  Description of Artificial Sequence:  Enzymatic Nucleic Acid
guccaaggcugaugaggccguuaggccgaaauacuaac

SEQ ID NO: 3058 - RNA, 38 nt, Artificial Sequence
  Description of Artificial Sequence:  Enzymatic Nucleic Acid
uguccaagcugaugaggccguuaggccgaaaauacuaa

SEQ ID NO: 3059 - RNA, 38 nt, Artificial Sequence
  Description of Artificial Sequence:  Enzymatic Nucleic Acid
augugucccugaugaggccguuaggccgaaaggaauac

SEQ ID NO: 3060 - RNA, 38 nt, Artificial Sequence
  Description of Artificial Sequence:  Enzymatic Nucleic Acid
ucccaccucugaugaggccguuaggccgaaaugugucc

SEQ ID NO: 3061 - RNA, 38 nt, Artificial Sequence
  Description of Artificial Sequence:  Enzymatic Nucleic Acid
gccccguacugaugaggccguuaggccgaaaguuuccc

SEQ ID NO: 3062 - RNA, 38 nt, Artificial Sequence
  Description of Artificial Sequence:  Enzymatic Nucleic Acid
agccccgucugaugaggccguuaggccgaaaaguuucc

SEQ ID NO: 3063 - RNA, 38 nt, Artificial Sequence
  Description of Artificial Sequence:  Enzymatic Nucleic Acid
aagccccgcugaugaggccguuaggccgaaaaaguuuc

SEQ ID NO: 3064 - RNA, 38 nt, Artificial Sequence
  Description of Artificial Sequence:  Enzymatic Nucleic Acid
gaagaauacugaugaggccguuaggccgaaagccccgu

SEQ ID NO: 3065 - RNA, 38 nt, Artificial Sequence
  Description of Artificial Sequence:  Enzymatic Nucleic Acid
agaagaaucugaugaggccguuaggccgaaaagccccg

SEQ ID NO: 3066 - RNA, 38 nt, Artificial Sequence
  Description of Artificial Sequence:  Enzymatic Nucleic Acid
uagaagaacugaugaggccguuaggccgaaaaagcccc

SEQ ID NO: 3067 - RNA, 38 nt, Artificial Sequence
  Description of Artificial Sequence:  Enzymatic Nucleic Acid
cguagaagcugaugaggccguuaggccgaaauaaagcc

SEQ ID NO: 3068 - RNA, 38 nt, Artificial Sequence
  Description of Artificial Sequence:  Enzymatic Nucleic Acid
ccguagaacugaugaggccguuaggccgaaaauaaagc

SEQ ID NO: 3069 - RNA, 38 nt, Artificial Sequence
  Description of Artificial Sequence:  Enzymatic Nucleic Acid
uaccguagcugaugaggccguuaggccgaaagaauaaa

SEQ ID NO: 3070 - RNA, 38 nt, Artificial Sequence
  Description of Artificial Sequence:  Enzymatic Nucleic Acid
guaccguacugaugaggccguuaggccgaaaagaauaa

SEQ ID NO: 3071 - RNA, 38 nt, Artificial Sequence
  Description of Artificial Sequence:  Enzymatic Nucleic Acid
agguaccgcugaugaggccguuaggccgaaagaagaau

SEQ ID NO: 3072 - RNA, 38 nt, Artificial Sequence
  Description of Artificial Sequence:  Enzymatic Nucleic Acid
aagcaaggcugaugaggccguuaggccgaaaccguaga

SEQ ID NO: 3073 - RNA, 38 nt, Artificial Sequence
  Description of Artificial Sequence:  Enzymatic Nucleic Acid
auuaaagccugaugaggccguuaggccgaaagguaccg

SEQ ID NO: 3074 - RNA, 38 nt, Artificial Sequence
  Description of Artificial Sequence:  Enzymatic Nucleic Acid
uaggauuacugaugaggccguuaggccgaaagcaaggu

SEQ ID NO: 3075 - RNA, 38 nt, Artificial Sequence
  Description of Artificial Sequence:  Enzymatic Nucleic Acid
uuaggauucugaugaggccguuaggccgaaaagcaagg

SEQ ID NO: 3076 - RNA, 38 nt, Artificial Sequence
  Description of Artificial Sequence:  Enzymatic Nucleic Acid
uuuaggaucugaugaggccguuaggccgaaaaagcaag

SEQ ID NO: 3077 - RNA, 38 nt, Artificial Sequence
  Description of Artificial Sequence:  Enzymatic Nucleic Acid
ccauuuagcugaugaggccguuaggccgaaauuaaagc

SEQ ID NO: 3078 - RNA, 38 nt, Artificial Sequence
  Description of Artificial Sequence:  Enzymatic Nucleic Acid
uugccauucugaugaggccguuaggccgaaaggauuaa

SEQ ID NO: 3079 - RNA, 38 nt, Artificial Sequence
  Description of Artificial Sequence:  Enzymatic Nucleic Acid
aaaagaagcugaugaggccguuaggccgaaaguuugcc

SEQ ID NO: 3080 - RNA, 38 nt, Artificial Sequence
  Description of Artificial Sequence:  Enzymatic Nucleic Acid
aggaaaagcugaugaggccguuaggccgaaaggaguuu

SEQ ID NO: 3081 - RNA, 38 nt, Artificial Sequence
  Description of Artificial Sequence:  Enzymatic Nucleic Acid
caggaaaacugaugaggccguuaggccgaaaaggaguu

SEQ ID NO: 3082 - RNA, 38 nt, Artificial Sequence
  Description of Artificial Sequence:  Enzymatic Nucleic Acid
gucaggaacugaugaggccguuaggccgaaagaaggag

SEQ ID NO: 3083 - RNA, 38 nt, Artificial Sequence
  Description of Artificial Sequence:  Enzymatic Nucleic Acid
ugucaggacugaugaggccguuaggccgaaaagaagga

SEQ ID NO: 3084 - RNA, 38 nt, Artificial Sequence
  Description of Artificial Sequence:  Enzymatic Nucleic Acid
augucaggcugaugaggccguuaggccgaaaaagaagg

SEQ ID NO: 3085 - RNA, 38 nt, Artificial Sequence
  Description of Artificial Sequence:  Enzymatic Nucleic Acid
aaugucagcugaugaggccguuaggccgaaaaaagaag

SEQ ID NO: 3086 - RNA, 38 nt, Artificial Sequence
  Description of Artificial Sequence:  Enzymatic Nucleic Acid
ugcaaaugcugaugaggccguuaggccgaaaugucagg

SEQ ID NO: 3087 - RNA, 38 nt, Artificial Sequence
  Description of Artificial Sequence:  Enzymatic Nucleic Acid
cugcaaaucugaugaggccguuaggccgaaaaugucag

SEQ ID NO: 3088 - RNA, 38 nt, Artificial Sequence
  Description of Artificial Sequence:  Enzymatic Nucleic Acid
cuccugcacugaugaggccguuaggccgaaaugaaugu

SEQ ID NO: 3089 - RNA, 38 nt, Artificial Sequence
  Description of Artificial Sequence:  Enzymatic Nucleic Acid
ccuccugccugaugaggccguuaggccgaaaaugaaug

SEQ ID NO: 3090 - RNA, 38 nt, Artificial Sequence
  Description of Artificial Sequence:  Enzymatic Nucleic Acid
cuaucaaccugaugaggccguuaggccgaaauguccuc

SEQ ID NO: 3091 - RNA, 38 nt, Artificial Sequence
  Description of Artificial Sequence:  Enzymatic Nucleic Acid
caucuauccugaugaggccguuaggccgaaacaauguc

SEQ ID NO: 3092 - RNA, 38 nt, Artificial Sequence
  Description of Artificial Sequence:  Enzymatic Nucleic Acid
cuuacauccugaugaggccguuaggccgaaaucaacaa

SEQ ID NO: 3093 - RNA, 38 nt, Artificial Sequence
  Description of Artificial Sequence:  Enzymatic Nucleic Acid
aaauugcucugaugaggccguuaggccgaaacaucuau

SEQ ID NO: 3094 - RNA, 38 nt, Artificial Sequence
  Description of Artificial Sequence:  Enzymatic Nucleic Acid
gccccacacugaugaggccguuaggccgaaauugcuua

SEQ ID NO: 3095 - RNA, 38 nt, Artificial Sequence
  Description of Artificial Sequence:  Enzymatic Nucleic Acid
ggccccaccugaugaggccguuaggccgaaaauugcuu

SEQ ID NO: 3096 - RNA, 38 nt, Artificial Sequence
  Description of Artificial Sequence:  Enzymatic Nucleic Acid
uuuacugucugaugaggccguuaggccgaaaggggccc

SEQ ID NO: 3097 - RNA, 38 nt, Artificial Sequence
  Description of Artificial Sequence:  Enzymatic Nucleic Acid
auuuacugcugaugaggccguuaggccgaaaaggggcc

SEQ ID NO: 3098 - RNA, 38 nt, Artificial Sequence
  Description of Artificial Sequence:  Enzymatic Nucleic Acid
uuuucauucugaugaggccguuaggccgaaacuguaag

SEQ ID NO: 3099 - RNA, 38 nt, Artificial Sequence
  Description of Artificial Sequence:  Enzymatic Nucleic Acid
guuaauuucugaugaggccguuaggccgaaagucuccu

SEQ ID NO: 3100 - RNA, 38 nt, Artificial Sequence
  Description of Artificial Sequence:  Enzymatic Nucleic Acid
aguuaauucugaugaggccguuaggccgaaaagucucc

SEQ ID NO: 3101 - RNA, 38 nt, Artificial Sequence
  Description of Artificial Sequence:  Enzymatic Nucleic Acid
gcauaguucugaugaggccguuaggccgaaauuuaagu

SEQ ID NO: 3102 - RNA, 38 nt, Artificial Sequence
  Description of Artificial Sequence:  Enzymatic Nucleic Acid
ggcauagucugaugaggccguuaggccgaaaauuuaag

SEQ ID NO: 3103 - RNA, 38 nt, Artificial Sequence
  Description of Artificial Sequence:  Enzymatic Nucleic Acid
agcaggcacugaugaggccguuaggccgaaaguuaauu

SEQ ID NO: 3104 - RNA, 38 nt, Artificial Sequence
  Description of Artificial Sequence:  Enzymatic Nucleic Acid
auaaaacccugaugaggccguuaggccgaaagcaggca

SEQ ID NO: 3105 - RNA, 38 nt, Artificial Sequence
  Description of Artificial Sequence:  Enzymatic Nucleic Acid
ugggauaacugaugaggccguuaggccgaaaccuagca

SEQ ID NO: 3106 - RNA, 38 nt, Artificial Sequence
  Description of Artificial Sequence:  Enzymatic Nucleic Acid
uugggauacugaugaggccguuaggccgaaaaccuagc

SEQ ID NO: 3107 - RNA, 38 nt, Artificial Sequence
  Description of Artificial Sequence:  Enzymatic Nucleic Acid
auugggaucugaugaggccguuaggccgaaaaaccuag

SEQ ID NO: 3108 - RNA, 38 nt, Artificial Sequence
  Description of Artificial Sequence:  Enzymatic Nucleic Acid
cauugggacugaugaggccguuaggccgaaaaaaccua

SEQ ID NO: 3109 - RNA, 38 nt, Artificial Sequence
  Description of Artificial Sequence:  Enzymatic Nucleic Acid
aacauuggcugaugaggccguuaggccgaaauaaaacc

SEQ ID NO: 3110 - RNA, 38 nt, Artificial Sequence
  Description of Artificial Sequence:  Enzymatic Nucleic Acid
uauuuagucugaugaggccguuaggccgaaacauuggg

SEQ ID NO: 3111 - RNA, 38 nt, Artificial Sequence
  Description of Artificial Sequence:  Enzymatic Nucleic Acid
auauuuagcugaugaggccguuaggccgaaaacauugg

SEQ ID NO: 3112 - RNA, 38 nt, Artificial Sequence
  Description of Artificial Sequence:  Enzymatic Nucleic Acid
caaauauucugaugaggccguuaggccgaaaguaacau

SEQ ID NO: 3113 - RNA, 38 nt, Artificial Sequence
  Description of Artificial Sequence:  Enzymatic Nucleic Acid
agggcaaacugaugaggccguuaggccgaaauuuagua

SEQ ID NO: 3114 - RNA, 38 nt, Artificial Sequence
  Description of Artificial Sequence:  Enzymatic Nucleic Acid
uaagggcacugaugaggccguuaggccgaaauauuuag

SEQ ID NO: 3115 - RNA, 38 nt, Artificial Sequence
  Description of Artificial Sequence:  Enzymatic Nucleic Acid
cuaagggccugaugaggccguuaggccgaaaauauuua

SEQ ID NO: 3116 - RNA, 38 nt, Artificial Sequence
  Description of Artificial Sequence:  Enzymatic Nucleic Acid
cuuuaucucugaugaggccguuaggccgaaagggcaaa

SEQ ID NO: 3117 - RNA, 38 nt, Artificial Sequence
  Description of Artificial Sequence:  Enzymatic Nucleic Acid
ccuuuauccugaugaggccguuaggccgaaaagggcaa

SEQ ID NO: 3118 - RNA, 38 nt, Artificial Sequence
  Description of Artificial Sequence:  Enzymatic Nucleic Acid
gaucccuucugaugaggccguuaggccgaaaucuaagg

SEQ ID NO: 3119 - RNA, 38 nt, Artificial Sequence
  Description of Artificial Sequence:  Enzymatic Nucleic Acid
uacgguuucugaugaggccguuaggccgaaaucccuuu

SEQ ID NO: 3120 - RNA, 38 nt, Artificial Sequence
  Description of Artificial Sequence:  Enzymatic Nucleic Acid
cuggauaacugaugaggccguuaggccgaaacgguuug

SEQ ID NO: 3121 - RNA, 38 nt, Artificial Sequence
  Description of Artificial Sequence:  Enzymatic Nucleic Acid
cucuggaucugaugaggccguuaggccgaaauacgguu

SEQ ID NO: 3122 - RNA, 38 nt, Artificial Sequence
  Description of Artificial Sequence:  Enzymatic Nucleic Acid
acucuggacugaugaggccguuaggccgaaaauacggu

SEQ ID NO: 3123 - RNA, 38 nt, Artificial Sequence
  Description of Artificial Sequence:  Enzymatic Nucleic Acid
auacucugcugaugaggccguuaggccgaaauaauacg

SEQ ID NO: 3124 - RNA, 38 nt, Artificial Sequence
  Description of Artificial Sequence:  Enzymatic Nucleic Acid
uaacuacacugaugaggccguuaggccgaaacucugga

SEQ ID NO: 3125 - RNA, 38 nt, Artificial Sequence
  Description of Artificial Sequence:  Enzymatic Nucleic Acid
ugauuaaccugaugaggccguuaggccgaaacauacuc

SEQ ID NO: 3126 - RNA, 38 nt, Artificial Sequence
  Description of Artificial Sequence:  Enzymatic Nucleic Acid
uaaugauucugaugaggccguuaggccgaaacuacaua

SEQ ID NO: 3127 - RNA, 38 nt, Artificial Sequence
  Description of Artificial Sequence:  Enzymatic Nucleic Acid
guaaugaucugaugaggccguuaggccgaaaacuacau

SEQ ID NO: 3128 - RNA, 38 nt, Artificial Sequence
  Description of Artificial Sequence:  Enzymatic Nucleic Acid
gaaguaaucugaugaggccguuaggccgaaauuaacua

SEQ ID NO: 3129 - RNA, 38 nt, Artificial Sequence
  Description of Artificial Sequence:  Enzymatic Nucleic Acid
cuggaagucugaugaggccguuaggccgaaaugauuaa

SEQ ID NO: 3130 - RNA, 38 nt, Artificial Sequence
  Description of Artificial Sequence:  Enzymatic Nucleic Acid
ucuggaagcugaugaggccguuaggccgaaaaugauua

SEQ ID NO: 3131 - RNA, 38 nt, Artificial Sequence
  Description of Artificial Sequence:  Enzymatic Nucleic Acid
gcgucuggcugaugaggccguuaggccgaaaguaauga

SEQ ID NO: 3132 - RNA, 38 nt, Artificial Sequence
  Description of Artificial Sequence:  Enzymatic Nucleic Acid
cgcgucugcugaugaggccguuaggccgaaaaguaaug

SEQ ID NO: 3133 - RNA, 38 nt, Artificial Sequence
  Description of Artificial Sequence:  Enzymatic Nucleic Acid
guguaaaucugaugaggccguuaggccgaaaugucgcg

SEQ ID NO: 3134 - RNA, 38 nt, Artificial Sequence
  Description of Artificial Sequence:  Enzymatic Nucleic Acid
uguguaaacugaugaggccguuaggccgaaaaugucgc

SEQ ID NO: 3135 - RNA, 38 nt, Artificial Sequence
  Description of Artificial Sequence:  Enzymatic Nucleic Acid
aguguguacugaugaggccguuaggccgaaauaauguc

SEQ ID NO: 3136 - RNA, 38 nt, Artificial Sequence
  Description of Artificial Sequence:  Enzymatic Nucleic Acid
gagugugucugaugaggccguuaggccgaaaauaaugu

SEQ ID NO: 3137 - RNA, 38 nt, Artificial Sequence
  Description of Artificial Sequence:  Enzymatic Nucleic Acid
agagugugcugaugaggccguuaggccgaaaaauaaug

SEQ ID NO: 3138 - RNA, 38 nt, Artificial Sequence
  Description of Artificial Sequence:  Enzymatic Nucleic Acid
cuuccaaacugaugaggccguuaggccgaaagugugua

SEQ ID NO: 3139 - RNA, 38 nt, Artificial Sequence
  Description of Artificial Sequence:  Enzymatic Nucleic Acid
gccuuccacugaugaggccguuaggccgaaagagugug

SEQ ID NO: 3140 - RNA, 38 nt, Artificial Sequence
  Description of Artificial Sequence:  Enzymatic Nucleic Acid
cgccuucccugaugaggccguuaggccgaaaagagugu

SEQ ID NO: 3141 - RNA, 38 nt, Artificial Sequence
  Description of Artificial Sequence:  Enzymatic Nucleic Acid
uuauauaacugaugaggccguuaggccgaaauccccgc

SEQ ID NO: 3142 - RNA, 38 nt, Artificial Sequence
  Description of Artificial Sequence:  Enzymatic Nucleic Acid
uuuuauaucugaugaggccguuaggccgaaagaucccc

SEQ ID NO: 3143 - RNA, 38 nt, Artificial Sequence
  Description of Artificial Sequence:  Enzymatic Nucleic Acid
cuuuuauacugaugaggccguuaggccgaaaagauccc

SEQ ID NO: 3144 - RNA, 38 nt, Artificial Sequence
  Description of Artificial Sequence:  Enzymatic Nucleic Acid
cucuuuuacugaugaggccguuaggccgaaauaagauc

SEQ ID NO: 3145 - RNA, 38 nt, Artificial Sequence
  Description of Artificial Sequence:  Enzymatic Nucleic Acid
cucucuuucugaugaggccguuaggccgaaauauaaga

SEQ ID NO: 3146 - RNA, 38 nt, Artificial Sequence
  Description of Artificial Sequence:  Enzymatic Nucleic Acid
uacgugugcugaugaggccguuaggccgaaacucucuu

SEQ ID NO: 3147 - RNA, 38 nt, Artificial Sequence
  Description of Artificial Sequence:  Enzymatic Nucleic Acid
ugaggcgccugaugaggccguuaggccgaaacgugugg

SEQ ID NO: 3148 - RNA, 38 nt, Artificial Sequence
  Description of Artificial Sequence:  Enzymatic Nucleic Acid
cgcaaaaucugaugaggccguuaggccgaaaggcgcua

SEQ ID NO: 3149 - RNA, 38 nt, Artificial Sequence
  Description of Artificial Sequence:  Enzymatic Nucleic Acid
acccgcaacugaugaggccguuaggccgaaaugaggcg

SEQ ID NO: 3150 - RNA, 38 nt, Artificial Sequence
  Description of Artificial Sequence:  Enzymatic Nucleic Acid
gacccgcacugaugaggccguuaggccgaaaaugaggc

SEQ ID NO: 3151 - RNA, 38 nt, Artificial Sequence
  Description of Artificial Sequence:  Enzymatic Nucleic Acid
ugacccgccugaugaggccguuaggccgaaaaaugagg

SEQ ID NO: 3152 - RNA, 38 nt, Artificial Sequence
  Description of Artificial Sequence:  Enzymatic Nucleic Acid
aauauggucugaugaggccguuaggccgaaacccgcaa

SEQ ID NO: 3153 - RNA, 38 nt, Artificial Sequence
  Description of Artificial Sequence:  Enzymatic Nucleic Acid
cccaagaacugaugaggccguuaggccgaaauggugac

SEQ ID NO: 3154 - RNA, 38 nt, Artificial Sequence
  Description of Artificial Sequence:  Enzymatic Nucleic Acid
uucccaagcugaugaggccguuaggccgaaauauggug

SEQ ID NO: 3155 - RNA, 38 nt, Artificial Sequence
  Description of Artificial Sequence:  Enzymatic Nucleic Acid
guucccaacugaugaggccguuaggccgaaaauauggu

SEQ ID NO: 3156 - RNA, 38 nt, Artificial Sequence
  Description of Artificial Sequence:  Enzymatic Nucleic Acid
uuguuccccugaugaggccguuaggccgaaagaauaug

SEQ ID NO: 3157 - RNA, 38 nt, Artificial Sequence
  Description of Artificial Sequence:  Enzymatic Nucleic Acid
augcuguacugaugaggccguuaggccgaaaucuuguu

SEQ ID NO: 3158 - RNA, 38 nt, Artificial Sequence
  Description of Artificial Sequence:  Enzymatic Nucleic Acid
ccaugcugcugaugaggccguuaggccgaaagaucuug

SEQ ID NO: 3159 - RNA, 38 nt, Artificial Sequence
  Description of Artificial Sequence:  Enzymatic Nucleic Acid
ggaagacccugaugaggccguuaggccgaaaccuccca

SEQ ID NO: 3160 - RNA, 38 nt, Artificial Sequence
  Description of Artificial Sequence:  Enzymatic Nucleic Acid
guuuggaacugaugaggccguuaggccgaaaccaaccu

SEQ ID NO: 3161 - RNA, 38 nt, Artificial Sequence
  Description of Artificial Sequence:  Enzymatic Nucleic Acid
agguuuggcugaugaggccguuaggccgaaagaccaac

SEQ ID NO: 3162 - RNA, 38 nt, Artificial Sequence
  Description of Artificial Sequence:  Enzymatic Nucleic Acid
gagguuugcugaugaggccguuaggccgaaaagaccaa

SEQ ID NO: 3163 - RNA, 38 nt, Artificial Sequence
  Description of Artificial Sequence:  Enzymatic Nucleic Acid
gccuuuuccugaugaggccguuaggccgaaagguuugg

SEQ ID NO: 3164 - RNA, 38 nt, Artificial Sequence
  Description of Artificial Sequence:  Enzymatic Nucleic Acid
gacagaaacugaugaggccguuaggccgaaauuugucc

SEQ ID NO: 3165 - RNA, 38 nt, Artificial Sequence
  Description of Artificial Sequence:  Enzymatic Nucleic Acid
gggacagacugaugaggccguuaggccgaaagauuugu

SEQ ID NO: 3166 - RNA, 38 nt, Artificial Sequence
  Description of Artificial Sequence:  Enzymatic Nucleic Acid
ggggacagcugaugaggccguuaggccgaaaagauuug

SEQ ID NO: 3167 - RNA, 38 nt, Artificial Sequence
  Description of Artificial Sequence:  Enzymatic Nucleic Acid
uggggacacugaugaggccguuaggccgaaaaagauuu

SEQ ID NO: 3168 - RNA, 38 nt, Artificial Sequence
  Description of Artificial Sequence:  Enzymatic Nucleic Acid
ggauugggcugaugaggccguuaggccgaaacagaaag

SEQ ID NO: 3169 - RNA, 38 nt, Artificial Sequence
  Description of Artificial Sequence:  Enzymatic Nucleic Acid
ucccagggcugaugaggccguuaggccgaaauugggga

SEQ ID NO: 3170 - RNA, 38 nt, Artificial Sequence
  Description of Artificial Sequence:  Enzymatic Nucleic Acid
cggggaagcugaugaggccguuaggccgaaaucccagg

SEQ ID NO: 3171 - RNA, 38 nt, Artificial Sequence
  Description of Artificial Sequence:  Enzymatic Nucleic Acid
ucggggaacugaugaggccguuaggccgaaaaucccag

SEQ ID NO: 3172 - RNA, 38 nt, Artificial Sequence
  Description of Artificial Sequence:  Enzymatic Nucleic Acid
gaucggggcugaugaggccguuaggccgaaagaauccc

SEQ ID NO: 3173 - RNA, 38 nt, Artificial Sequence
  Description of Artificial Sequence:  Enzymatic Nucleic Acid
ugaucgggcugaugaggccguuaggccgaaaagaaucc

SEQ ID NO: 3174 - RNA, 38 nt, Artificial Sequence
  Description of Artificial Sequence:  Enzymatic Nucleic Acid
caacugaucugaugaggccguuaggccgaaaucgggga

SEQ ID NO: 3175 - RNA, 38 nt, Artificial Sequence
  Description of Artificial Sequence:  Enzymatic Nucleic Acid
guccaacucugaugaggccguuaggccgaaaugaucgg

SEQ ID NO: 3176 - RNA, 38 nt, Artificial Sequence
  Description of Artificial Sequence:  Enzymatic Nucleic Acid
cagggucccugaugaggccguuaggccgaaacugauga

SEQ ID NO: 3177 - RNA, 38 nt, Artificial Sequence
  Description of Artificial Sequence:  Enzymatic Nucleic Acid
uggcuuugcugaugaggccguuaggccgaaaugcaggg

SEQ ID NO: 3178 - RNA, 38 nt, Artificial Sequence
  Description of Artificial Sequence:  Enzymatic Nucleic Acid
uuggcuuucugaugaggccguuaggccgaaaaugcagg

SEQ ID NO: 3179 - RNA, 38 nt, Artificial Sequence
  Description of Artificial Sequence:  Enzymatic Nucleic Acid
gauuuacucugaugaggccguuaggccgaaaguuggcu

SEQ ID NO: 3180 - RNA, 38 nt, Artificial Sequence
  Description of Artificial Sequence:  Enzymatic Nucleic Acid
ucuggauucugaugaggccguuaggccgaaacugaguu

SEQ ID NO: 3181 - RNA, 38 nt, Artificial Sequence
  Description of Artificial Sequence:  Enzymatic Nucleic Acid
ccaaucugcugaugaggccguuaggccgaaauuuacug

SEQ ID NO: 3182 - RNA, 38 nt, Artificial Sequence
  Description of Artificial Sequence:  Enzymatic Nucleic Acid
gagguccccugaugaggccguuaggccgaaaucuggau

SEQ ID NO: 3183 - RNA, 38 nt, Artificial Sequence
  Description of Artificial Sequence:  Enzymatic Nucleic Acid
ugcggguucugaugaggccguuaggccgaaagguccca

SEQ ID NO: 3184 - RNA, 38 nt, Artificial Sequence
  Description of Artificial Sequence:  Enzymatic Nucleic Acid
cuggcccgcugaugaggccguuaggccgaaaugcuccc

SEQ ID NO: 3185 - RNA, 38 nt, Artificial Sequence
  Description of Artificial Sequence:  Enzymatic Nucleic Acid
ccuggccccugaugaggccguuaggccgaaaaugcucc

SEQ ID NO: 3186 - RNA, 38 nt, Artificial Sequence
  Description of Artificial Sequence:  Enzymatic Nucleic Acid
gaggggugcugaugaggccguuaggccgaaacccuggc

SEQ ID NO: 3187 - RNA, 38 nt, Artificial Sequence
  Description of Artificial Sequence:  Enzymatic Nucleic Acid
ggaggggucugaugaggccguuaggccgaaaacccugg

SEQ ID NO: 3188 - RNA, 38 nt, Artificial Sequence
  Description of Artificial Sequence:  Enzymatic Nucleic Acid
cccaugggcugaugaggccguuaggccgaaagggguga

SEQ ID NO: 3189 - RNA, 38 nt, Artificial Sequence
  Description of Artificial Sequence:  Enzymatic Nucleic Acid
uccacccccugaugaggccguuaggccgaaacaguccc

SEQ ID NO: 3190 - RNA, 38 nt, Artificial Sequence
  Description of Artificial Sequence:  Enzymatic Nucleic Acid
cugagcgucugaugaggccguuaggccgaaagggcucc

SEQ ID NO: 3191 - RNA, 38 nt, Artificial Sequence
  Description of Artificial Sequence:  Enzymatic Nucleic Acid
uaggcccucugaugaggccguuaggccgaaagcgugag

SEQ ID NO: 3192 - RNA, 38 nt, Artificial Sequence
  Description of Artificial Sequence:  Enzymatic Nucleic Acid
guugugagcugaugaggccguuaggccgaaaggcccug

SEQ ID NO: 3193 - RNA, 38 nt, Artificial Sequence
  Description of Artificial Sequence:  Enzymatic Nucleic Acid
acaguugucugaugaggccguuaggccgaaaguaggcc

SEQ ID NO: 3194 - RNA, 38 nt, Artificial Sequence
  Description of Artificial Sequence:  Enzymatic Nucleic Acid
aggaggagcugaugaggccguuaggccgaaagcugcug

SEQ ID NO: 3195 - RNA, 38 nt, Artificial Sequence
  Description of Artificial Sequence:  Enzymatic Nucleic Acid
ggcaggagcugaugaggccguuaggccgaaaggagcug

SEQ ID NO: 3196 - RNA, 38 nt, Artificial Sequence
  Description of Artificial Sequence:  Enzymatic Nucleic Acid
ggaggcagcugaugaggccguuaggccgaaaggaggag

SEQ ID NO: 3197 - RNA, 38 nt, Artificial Sequence
  Description of Artificial Sequence:  Enzymatic Nucleic Acid
gauuggugcugaugaggccguuaggccgaaaggcagga

SEQ ID NO: 3198 - RNA, 38 nt, Artificial Sequence
  Description of Artificial Sequence:  Enzymatic Nucleic Acid
ugacugcccugaugaggccguuaggccgaaauuggugg

SEQ ID NO: 3199 - RNA, 38 nt, Artificial Sequence
  Description of Artificial Sequence:  Enzymatic Nucleic Acid
gccuuccucugaugaggccguuaggccgaaacugccga

SEQ ID NO: 3200 - RNA, 38 nt, Artificial Sequence
  Description of Artificial Sequence:  Enzymatic Nucleic Acid
uaagggagcugaugaggccguuaggccgaaaggcugcc

SEQ ID NO: 3201 - RNA, 38 nt, Artificial Sequence
  Description of Artificial Sequence:  Enzymatic Nucleic Acid
agauaaggcugaugaggccguuaggccgaaaguaggcu

SEQ ID NO: 3202 - RNA, 38 nt, Artificial Sequence
  Description of Artificial Sequence:  Enzymatic Nucleic Acid
guggagaucugaugaggccguuaggccgaaagggagua

SEQ ID NO: 3203 - RNA, 38 nt, Artificial Sequence
  Description of Artificial Sequence:  Enzymatic Nucleic Acid
gguggagacugaugaggccguuaggccgaaaagggagu

SEQ ID NO: 3204 - RNA, 38 nt, Artificial Sequence
  Description of Artificial Sequence:  Enzymatic Nucleic Acid
gagguggacugaugaggccguuaggccgaaauaaggga

SEQ ID NO: 3205 - RNA, 38 nt, Artificial Sequence
  Description of Artificial Sequence:  Enzymatic Nucleic Acid
uagaggugcugaugaggccguuaggccgaaagauaagg

SEQ ID NO: 3206 - RNA, 38 nt, Artificial Sequence
  Description of Artificial Sequence:  Enzymatic Nucleic Acid
gucccuuacugaugaggccguuaggccgaaagguggag

SEQ ID NO: 3207 - RNA, 38 nt, Artificial Sequence
  Description of Artificial Sequence:  Enzymatic Nucleic Acid
gugucccucugaugaggccguuaggccgaaagaggugg

SEQ ID NO: 3208 - RNA, 38 nt, Artificial Sequence
  Description of Artificial Sequence:  Enzymatic Nucleic Acid
cugaggaucugaugaggccguuaggccgaaaguguccc

SEQ ID NO: 3209 - RNA, 38 nt, Artificial Sequence
  Description of Artificial Sequence:  Enzymatic Nucleic Acid
ggccugagcugaugaggccguuaggccgaaaugagugu

SEQ ID NO: 3210 - RNA, 38 nt, Artificial Sequence
  Description of Artificial Sequence:  Enzymatic Nucleic Acid
cauggccucugaugaggccguuaggccgaaaggaugag

SEQ ID NO: 3211 - RNA, 38 nt, Artificial Sequence
  Description of Artificial Sequence:  Enzymatic Nucleic Acid
  misc_feature (31)..(31): n stands for inosine
uggaaagucugaugaggccguuaggccgaanuggaguu

SEQ ID NO: 3212 - RNA, 38 nt, Artificial Sequence
  Description of Artificial Sequence:  Enzymatic Nucleic Acid
  misc_feature (31)..(31): n stands for inosine
guggaaagcugaugaggccguuaggccgaanguggagu

SEQ ID NO: 3213 - RNA, 38 nt, Artificial Sequence
  Description of Artificial Sequence:  Enzymatic Nucleic Acid
  misc_feature (31)..(31): n stands for inosine
ugguggaacugaugaggccguuaggccgaanuggugga

SEQ ID NO: 3214 - RNA, 38 nt, Artificial Sequence
  Description of Artificial Sequence:  Enzymatic Nucleic Acid
  misc_feature (31)..(31): n stands for inosine
aguuuggucugaugaggccguuaggccgaanaaagugg

SEQ ID NO: 3215 - RNA, 38 nt, Artificial Sequence
  Description of Artificial Sequence:  Enzymatic Nucleic Acid
  misc_feature (31)..(31): n stands for inosine
gaguuuggcugaugaggccguuaggccgaangaaagug

SEQ ID NO: 3216 - RNA, 38 nt, Artificial Sequence
  Description of Artificial Sequence:  Enzymatic Nucleic Acid
  misc_feature (31)..(31): n stands for inosine
aagaguuucugaugaggccguuaggccgaanuggaaag

SEQ ID NO: 3217 - RNA, 38 nt, Artificial Sequence
  Description of Artificial Sequence:  Enzymatic Nucleic Acid
  misc_feature (31)..(31): n stands for inosine
gaagaguucugaugaggccguuaggccgaanguggaaa

SEQ ID NO: 3218 - RNA, 38 nt, Artificial Sequence
  Description of Artificial Sequence:  Enzymatic Nucleic Acid
  misc_feature (31)..(31): n stands for inosine
ucuugaagcugaugaggccguuaggccgaanuuuggug

SEQ ID NO: 3219 - RNA, 38 nt, Artificial Sequence
  Description of Artificial Sequence:  Enzymatic Nucleic Acid
  misc_feature (31)..(31): n stands for inosine
gaucuugacugaugaggccguuaggccgaanaguuugg

SEQ ID NO: 3220 - RNA, 38 nt, Artificial Sequence
  Description of Artificial Sequence:  Enzymatic Nucleic Acid
  misc_feature (31)..(31): n stands for inosine
ugggaucucugaugaggccguuaggccgaanaagaguu

SEQ ID NO: 3221 - RNA, 38 nt, Artificial Sequence
  Description of Artificial Sequence:  Enzymatic Nucleic Acid
  misc_feature (31)..(31): n stands for inosine
ugacucugcugaugaggccguuaggccgaanaucuuga

SEQ ID NO: 3222 - RNA, 38 nt, Artificial Sequence
  Description of Artificial Sequence:  Enzymatic Nucleic Acid
  misc_feature (31)..(31): n stands for inosine
cugacucucugaugaggccguuaggccgaangaucuug

SEQ ID NO: 3223 - RNA, 38 nt, Artificial Sequence
  Description of Artificial Sequence:  Enzymatic Nucleic Acid
  misc_feature (31)..(31): n stands for inosine
ccugacuccugaugaggccguuaggccgaanggaucuu

SEQ ID NO: 3224 - RNA, 38 nt, Artificial Sequence
  Description of Artificial Sequence:  Enzymatic Nucleic Acid
  misc_feature (31)..(31): n stands for inosine
cagggccccugaugaggccguuaggccgaanacucugg

SEQ ID NO: 3225 - RNA, 38 nt, Artificial Sequence
  Description of Artificial Sequence:  Enzymatic Nucleic Acid
  misc_feature (31)..(31): n stands for inosine
aaguacagcugaugaggccguuaggccgaancccugac

SEQ ID NO: 3226 - RNA, 38 nt, Artificial Sequence
  Description of Artificial Sequence:  Enzymatic Nucleic Acid
  misc_feature (31)..(31): n stands for inosine
aaaguacacugaugaggccguuaggccgaangcccuga

SEQ ID NO: 3227 - RNA, 38 nt, Artificial Sequence
  Description of Artificial Sequence:  Enzymatic Nucleic Acid
  misc_feature (31)..(31): n stands for inosine
gaaaguaccugaugaggccguuaggccgaanggcccug

SEQ ID NO: 3228 - RNA, 38 nt, Artificial Sequence
  Description of Artificial Sequence:  Enzymatic Nucleic Acid
  misc_feature (31)..(31): n stands for inosine
agcaggaacugaugaggccguuaggccgaanuacaggg

SEQ ID NO: 3229 - RNA, 38 nt, Artificial Sequence
  Description of Artificial Sequence:  Enzymatic Nucleic Acid
  misc_feature (31)..(31): n stands for inosine
caccagcacugaugaggccguuaggccgaanaaaguac

SEQ ID NO: 3230 - RNA, 38 nt, Artificial Sequence
  Description of Artificial Sequence:  Enzymatic Nucleic Acid
  misc_feature (31)..(31): n stands for inosine
ccaccagccugaugaggccguuaggccgaangaaagua

SEQ ID NO: 3231 - RNA, 38 nt, Artificial Sequence
  Description of Artificial Sequence:  Enzymatic Nucleic Acid
  misc_feature (31)..(31): n stands for inosine
gagccacccugaugaggccguuaggccgaancaggaaa

SEQ ID NO: 3232 - RNA, 38 nt, Artificial Sequence
  Description of Artificial Sequence:  Enzymatic Nucleic Acid
  misc_feature (31)..(31): n stands for inosine
ugaacuggcugaugaggccguuaggccgaanccaccag

SEQ ID NO: 3233 - RNA, 38 nt, Artificial Sequence
  Description of Artificial Sequence:  Enzymatic Nucleic Acid
  misc_feature (31)..(31): n stands for inosine
ccugaacucugaugaggccguuaggccgaanagccacc

SEQ ID NO: 3234 - RNA, 38 nt, Artificial Sequence
  Description of Artificial Sequence:  Enzymatic Nucleic Acid
  misc_feature (31)..(31): n stands for inosine
uccugaaccugaugaggccguuaggccgaangagccac

SEQ ID NO: 3235 - RNA, 38 nt, Artificial Sequence
  Description of Artificial Sequence:  Enzymatic Nucleic Acid
  misc_feature (31)..(31): n stands for inosine
acuguucccugaugaggccguuaggccgaanaacugga

SEQ ID NO: 3236 - RNA, 38 nt, Artificial Sequence
  Description of Artificial Sequence:  Enzymatic Nucleic Acid
  misc_feature (31)..(31): n stands for inosine
gggcucaccugaugaggccguuaggccgaanuuccuga

SEQ ID NO: 3237 - RNA, 38 nt, Artificial Sequence
  Description of Artificial Sequence:  Enzymatic Nucleic Acid
  misc_feature (31)..(31): n stands for inosine
cugagcagcugaugaggccguuaggccgaancucacug

SEQ ID NO: 3238 - RNA, 38 nt, Artificial Sequence
  Description of Artificial Sequence:  Enzymatic Nucleic Acid
  misc_feature (31)..(31): n stands for inosine
ucugagcacugaugaggccguuaggccgaangcucacu

SEQ ID NO: 3239 - RNA, 38 nt, Artificial Sequence
  Description of Artificial Sequence:  Enzymatic Nucleic Acid
  misc_feature (31)..(31): n stands for inosine
uucugagccugaugaggccguuaggccgaanggcucac

SEQ ID NO: 3240 - RNA, 38 nt, Artificial Sequence
  Description of Artificial Sequence:  Enzymatic Nucleic Acid
  misc_feature (31)..(31): n stands for inosine
guauucugcugaugaggccguuaggccgaancagggcu

SEQ ID NO: 3241 - RNA, 38 nt, Artificial Sequence
  Description of Artificial Sequence:  Enzymatic Nucleic Acid
  misc_feature (31)..(31): n stands for inosine
caguauuccugaugaggccguuaggccgaanagcaggg

SEQ ID NO: 3242 - RNA, 38 nt, Artificial Sequence
  Description of Artificial Sequence:  Enzymatic Nucleic Acid
  misc_feature (31)..(31): n stands for inosine
gcagagaccugaugaggccguuaggccgaanuauucug

SEQ ID NO: 3243 - RNA, 38 nt, Artificial Sequence
  Description of Artificial Sequence:  Enzymatic Nucleic Acid
  misc_feature (31)..(31): n stands for inosine
uauggcagcugaugaggccguuaggccgaanacaguau

SEQ ID NO: 3244 - RNA, 38 nt, Artificial Sequence
  Description of Artificial Sequence:  Enzymatic Nucleic Acid
  misc_feature (31)..(31): n stands for inosine
gauauggccugaugaggccguuaggccgaanagacagu

SEQ ID NO: 3245 - RNA, 38 nt, Artificial Sequence
  Description of Artificial Sequence:  Enzymatic Nucleic Acid
  misc_feature (31)..(31): n stands for inosine
gacgauaucugaugaggccguuaggccgaancagagac

SEQ ID NO: 3246 - RNA, 38 nt, Artificial Sequence
  Description of Artificial Sequence:  Enzymatic Nucleic Acid
  misc_feature (31)..(31): n stands for inosine
ugacgauacugaugaggccguuaggccgaangcagaga

SEQ ID NO: 3247 - RNA, 38 nt, Artificial Sequence
  Description of Artificial Sequence:  Enzymatic Nucleic Acid
  misc_feature (31)..(31): n stands for inosine
gauaagaucugaugaggccguuaggccgaanacgauau

SEQ ID NO: 3248 - RNA, 38 nt, Artificial Sequence
  Description of Artificial Sequence:  Enzymatic Nucleic Acid
  misc_feature (31)..(31): n stands for inosine
cuucgauacugaugaggccguuaggccgaanauugacg

SEQ ID NO: 3249 - RNA, 38 nt, Artificial Sequence
  Description of Artificial Sequence:  Enzymatic Nucleic Acid
  misc_feature (31)..(31): n stands for inosine
gggucccccugaugaggccguuaggccgaanucuucga

SEQ ID NO: 3250 - RNA, 38 nt, Artificial Sequence
  Description of Artificial Sequence:  Enzymatic Nucleic Acid
  misc_feature (31)..(31): n stands for inosine
cgguacagcugaugaggccguuaggccgaanuccccag

SEQ ID NO: 3251 - RNA, 38 nt, Artificial Sequence
  Description of Artificial Sequence:  Enzymatic Nucleic Acid
  misc_feature (31)..(31): n stands for inosine
ucgguacacugaugaggccguuaggccgaangucccca

SEQ ID NO: 3252 - RNA, 38 nt, Artificial Sequence
  Description of Artificial Sequence:  Enzymatic Nucleic Acid
  misc_feature (31)..(31): n stands for inosine
uucgguaccugaugaggccguuaggccgaanggucccc

SEQ ID NO: 3253 - RNA, 38 nt, Artificial Sequence
  Description of Artificial Sequence:  Enzymatic Nucleic Acid
  misc_feature (31)..(31): n stands for inosine
ccauguuccugaugaggccguuaggccgaanuacaggg

SEQ ID NO: 3254 - RNA, 38 nt, Artificial Sequence
  Description of Artificial Sequence:  Enzymatic Nucleic Acid
  misc_feature (31)..(31): n stands for inosine
guucuccacugaugaggccguuaggccgaanuucggua

SEQ ID NO: 3255 - RNA, 38 nt, Artificial Sequence
  Description of Artificial Sequence:  Enzymatic Nucleic Acid
  misc_feature (31)..(31): n stands for inosine
ugaugcgacugaugaggccguuaggccgaanuucucca

SEQ ID NO: 3256 - RNA, 38 nt, Artificial Sequence
  Description of Artificial Sequence:  Enzymatic Nucleic Acid
  misc_feature (31)..(31): n stands for inosine
aguccugacugaugaggccguuaggccgaancgauguu

SEQ ID NO: 3257 - RNA, 38 nt, Artificial Sequence
  Description of Artificial Sequence:  Enzymatic Nucleic Acid
  misc_feature (31)..(31): n stands for inosine
aggagucccugaugaggccguuaggccgaanaugcgau

SEQ ID NO: 3258 - RNA, 38 nt, Artificial Sequence
  Description of Artificial Sequence:  Enzymatic Nucleic Acid
  misc_feature (31)..(31): n stands for inosine
guccuaggcugaugaggccguuaggccgaanuccugau

SEQ ID NO: 3259 - RNA, 38 nt, Artificial Sequence
  Description of Artificial Sequence:  Enzymatic Nucleic Acid
  misc_feature (31)..(31): n stands for inosine
ggguccuacugaugaggccguuaggccgaanaguccug

SEQ ID NO: 3260 - RNA, 38 nt, Artificial Sequence
  Description of Artificial Sequence:  Enzymatic Nucleic Acid
  misc_feature (31)..(31): n stands for inosine
gggguccucugaugaggccguuaggccgaangaguccu

SEQ ID NO: 3261 - RNA, 38 nt, Artificial Sequence
  Description of Artificial Sequence:  Enzymatic Nucleic Acid
  misc_feature (31)..(31): n stands for inosine
cgagcaggcugaugaggccguuaggccgaanuccuagg

SEQ ID NO: 3262 - RNA, 38 nt, Artificial Sequence
  Description of Artificial Sequence:  Enzymatic Nucleic Acid
  misc_feature (31)..(31): n stands for inosine
acgagcagcugaugaggccguuaggccgaanguccuag

SEQ ID NO: 3263 - RNA, 38 nt, Artificial Sequence
  Description of Artificial Sequence:  Enzymatic Nucleic Acid
  misc_feature (31)..(31): n stands for inosine
cacgagcacugaugaggccguuaggccgaangguccua

SEQ ID NO: 3264 - RNA, 38 nt, Artificial Sequence
  Description of Artificial Sequence:  Enzymatic Nucleic Acid
  misc_feature (31)..(31): n stands for inosine
acacgagccugaugaggccguuaggccgaanggguccu

SEQ ID NO: 3265 - RNA, 38 nt, Artificial Sequence
  Description of Artificial Sequence:  Enzymatic Nucleic Acid
  misc_feature (31)..(31): n stands for inosine
guaacacgcugaugaggccguuaggccgaancaggggu

SEQ ID NO: 3266 - RNA, 38 nt, Artificial Sequence
  Description of Artificial Sequence:  Enzymatic Nucleic Acid
  misc_feature (31)..(31): n stands for inosine
accccgcccugaugaggccguuaggccgaanuaacacg

SEQ ID NO: 3267 - RNA, 38 nt, Artificial Sequence
  Description of Artificial Sequence:  Enzymatic Nucleic Acid
  misc_feature (31)..(31): n stands for inosine
ugucaacacugaugaggccguuaggccgaanaaaaacc

SEQ ID NO: 3268 - RNA, 38 nt, Artificial Sequence
  Description of Artificial Sequence:  Enzymatic Nucleic Acid
  misc_feature (31)..(31): n stands for inosine
aggauuuucugaugaggccguuaggccgaanucaacaa

SEQ ID NO: 3269 - RNA, 38 nt, Artificial Sequence
  Description of Artificial Sequence:  Enzymatic Nucleic Acid
  misc_feature (31)..(31): n stands for inosine
uauugugacugaugaggccguuaggccgaanauuuuug

SEQ ID NO: 3270 - RNA, 38 nt, Artificial Sequence
  Description of Artificial Sequence:  Enzymatic Nucleic Acid
  misc_feature (31)..(31): n stands for inosine
guauugugcugaugaggccguuaggccgaangauuuuu

SEQ ID NO: 3271 - RNA, 38 nt, Artificial Sequence
  Description of Artificial Sequence:  Enzymatic Nucleic Acid
  misc_feature (31)..(31): n stands for inosine
ugguauugcugaugaggccguuaggccgaanaggauuu

SEQ ID NO: 3272 - RNA, 38 nt, Artificial Sequence
  Description of Artificial Sequence:  Enzymatic Nucleic Acid
  misc_feature (31)..(31): n stands for inosine
ugugguaucugaugaggccguuaggccgaanugaggau

SEQ ID NO: 3273 - RNA, 38 nt, Artificial Sequence
  Description of Artificial Sequence:  Enzymatic Nucleic Acid
  misc_feature (31)..(31): n stands for inosine
gacucugucugaugaggccguuaggccgaanuauugug

SEQ ID NO: 3274 - RNA, 38 nt, Artificial Sequence
  Description of Artificial Sequence:  Enzymatic Nucleic Acid
  misc_feature (31)..(31): n stands for inosine
agacucugcugaugaggccguuaggccgaanguauugu

SEQ ID NO: 3275 - RNA, 38 nt, Artificial Sequence
  Description of Artificial Sequence:  Enzymatic Nucleic Acid
  misc_feature (31)..(31): n stands for inosine
cuagacuccugaugaggccguuaggccgaanugguauu

SEQ ID NO: 3276 - RNA, 38 nt, Artificial Sequence
  Description of Artificial Sequence:  Enzymatic Nucleic Acid
  misc_feature (31)..(31): n stands for inosine
acgagucucugaugaggccguuaggccgaanacucugu

SEQ ID NO: 3277 - RNA, 38 nt, Artificial Sequence
  Description of Artificial Sequence:  Enzymatic Nucleic Acid
  misc_feature (31)..(31): n stands for inosine
ccaccacgcugaugaggccguuaggccgaanucuagac

SEQ ID NO: 3278 - RNA, 38 nt, Artificial Sequence
  Description of Artificial Sequence:  Enzymatic Nucleic Acid
  misc_feature (31)..(31): n stands for inosine
uugagagacugaugaggccguuaggccgaanuccacca

SEQ ID NO: 3279 - RNA, 38 nt, Artificial Sequence
  Description of Artificial Sequence:  Enzymatic Nucleic Acid
  misc_feature (31)..(31): n stands for inosine
aaauugagcugaugaggccguuaggccgaanaagucca

SEQ ID NO: 3280 - RNA, 38 nt, Artificial Sequence
  Description of Artificial Sequence:  Enzymatic Nucleic Acid
  misc_feature (31)..(31): n stands for inosine
gaaaauugcugaugaggccguuaggccgaanagaaguc

SEQ ID NO: 3281 - RNA, 38 nt, Artificial Sequence
  Description of Artificial Sequence:  Enzymatic Nucleic Acid
  misc_feature (31)..(31): n stands for inosine
uagaaaaucugaugaggccguuaggccgaanagagaag

SEQ ID NO: 3282 - RNA, 38 nt, Artificial Sequence
  Description of Artificial Sequence:  Enzymatic Nucleic Acid
  misc_feature (31)..(31): n stands for inosine
uucccccucugaugaggccguuaggccgaanaaaauug

SEQ ID NO: 3283 - RNA, 38 nt, Artificial Sequence
  Description of Artificial Sequence:  Enzymatic Nucleic Acid
  misc_feature (31)..(31): n stands for inosine
cacacgggcugaugaggccguuaggccgaanuuccccc

SEQ ID NO: 3284 - RNA, 38 nt, Artificial Sequence
  Description of Artificial Sequence:  Enzymatic Nucleic Acid
  misc_feature (31)..(31): n stands for inosine
gacacacgcugaugaggccguuaggccgaanuguuccc

SEQ ID NO: 3285 - RNA, 38 nt, Artificial Sequence
  Description of Artificial Sequence:  Enzymatic Nucleic Acid
  misc_feature (31)..(31): n stands for inosine
agacacaccugaugaggccguuaggccgaanguguucc

SEQ ID NO: 3286 - RNA, 38 nt, Artificial Sequence
  Description of Artificial Sequence:  Enzymatic Nucleic Acid
  misc_feature (31)..(31): n stands for inosine
uuuggccacugaugaggccguuaggccgaanacacacg

SEQ ID NO: 3287 - RNA, 38 nt, Artificial Sequence
  Description of Artificial Sequence:  Enzymatic Nucleic Acid
  misc_feature (31)..(31): n stands for inosine
cgaauuuucugaugaggccguuaggccgaanccaagac

SEQ ID NO: 3288 - RNA, 38 nt, Artificial Sequence
  Description of Artificial Sequence:  Enzymatic Nucleic Acid
  misc_feature (31)..(31): n stands for inosine
gcgaauuucugaugaggccguuaggccgaangccaaga

SEQ ID NO: 3289 - RNA, 38 nt, Artificial Sequence
  Description of Artificial Sequence:  Enzymatic Nucleic Acid
  misc_feature (31)..(31): n stands for inosine
uuugggaccugaugaggccguuaggccgaancgaauuu

SEQ ID NO: 3290 - RNA, 38 nt, Artificial Sequence
  Description of Artificial Sequence:  Enzymatic Nucleic Acid
  misc_feature (31)..(31): n stands for inosine
gagauuugcugaugaggccguuaggccgaanacugcga

SEQ ID NO: 3291 - RNA, 38 nt, Artificial Sequence
  Description of Artificial Sequence:  Enzymatic Nucleic Acid
  misc_feature (31)..(31): n stands for inosine
ggagauuucugaugaggccguuaggccgaangacugcg

SEQ ID NO: 3292 - RNA, 38 nt, Artificial Sequence
  Description of Artificial Sequence:  Enzymatic Nucleic Acid
  misc_feature (31)..(31): n stands for inosine
uggagauucugaugaggccguuaggccgaanggacugc

SEQ ID NO: 3293 - RNA, 38 nt, Artificial Sequence
  Description of Artificial Sequence:  Enzymatic Nucleic Acid
  misc_feature (31)..(31): n stands for inosine
gugacuggcugaugaggccguuaggccgaanauuuggg

SEQ ID NO: 3294 - RNA, 38 nt, Artificial Sequence
  Description of Artificial Sequence:  Enzymatic Nucleic Acid
  misc_feature (31)..(31): n stands for inosine
gagugacucugaugaggccguuaggccgaanagauuug

SEQ ID NO: 3295 - RNA, 38 nt, Artificial Sequence
  Description of Artificial Sequence:  Enzymatic Nucleic Acid
  misc_feature (31)..(31): n stands for inosine
ugagugaccugaugaggccguuaggccgaangagauuu

SEQ ID NO: 3296 - RNA, 38 nt, Artificial Sequence
  Description of Artificial Sequence:  Enzymatic Nucleic Acid
  misc_feature (31)..(31): n stands for inosine
uuggugagcugaugaggccguuaggccgaanacuggag

SEQ ID NO: 3297 - RNA, 38 nt, Artificial Sequence
  Description of Artificial Sequence:  Enzymatic Nucleic Acid
  misc_feature (31)..(31): n stands for inosine
gguuggugcugaugaggccguuaggccgaanugacugg

SEQ ID NO: 3298 - RNA, 38 nt, Artificial Sequence
  Description of Artificial Sequence:  Enzymatic Nucleic Acid
  misc_feature (31)..(31): n stands for inosine
cagguuggcugaugaggccguuaggccgaanagugacu

SEQ ID NO: 3299 - RNA, 38 nt, Artificial Sequence
  Description of Artificial Sequence:  Enzymatic Nucleic Acid
  misc_feature (31)..(31): n stands for inosine
aacagguucugaugaggccguuaggccgaanugaguga

SEQ ID NO: 3300 - RNA, 38 nt, Artificial Sequence
  Description of Artificial Sequence:  Enzymatic Nucleic Acid
  misc_feature (31)..(31): n stands for inosine
caacaggucugaugaggccguuaggccgaangugagug

SEQ ID NO: 3301 - RNA, 38 nt, Artificial Sequence
  Description of Artificial Sequence:  Enzymatic Nucleic Acid
  misc_feature (31)..(31): n stands for inosine
ggacaacacugaugaggccguuaggccgaanuugguga

SEQ ID NO: 3302 - RNA, 38 nt, Artificial Sequence
  Description of Artificial Sequence:  Enzymatic Nucleic Acid
  misc_feature (31)..(31): n stands for inosine
aggacaaccugaugaggccguuaggccgaanguuggug

SEQ ID NO: 3303 - RNA, 38 nt, Artificial Sequence
  Description of Artificial Sequence:  Enzymatic Nucleic Acid
  misc_feature (31)..(31): n stands for inosine
aaauuggacugaugaggccguuaggccgaanacaacag

SEQ ID NO: 3304 - RNA, 38 nt, Artificial Sequence
  Description of Artificial Sequence:  Enzymatic Nucleic Acid
  misc_feature (31)..(31): n stands for inosine
caaauuggcugaugaggccguuaggccgaangacaaca

SEQ ID NO: 3305 - RNA, 38 nt, Artificial Sequence
  Description of Artificial Sequence:  Enzymatic Nucleic Acid
  misc_feature (31)..(31): n stands for inosine
gacaaauucugaugaggccguuaggccgaanaggacaa

SEQ ID NO: 3306 - RNA, 38 nt, Artificial Sequence
  Description of Artificial Sequence:  Enzymatic Nucleic Acid
  misc_feature (31)..(31): n stands for inosine
ggacaaaucugaugaggccguuaggccgaangaggaca

SEQ ID NO: 3307 - RNA, 38 nt, Artificial Sequence
  Description of Artificial Sequence:  Enzymatic Nucleic Acid
  misc_feature (31)..(31): n stands for inosine
gauaaccacugaugaggccguuaggccgaanacaaauu

SEQ ID NO: 3308 - RNA, 38 nt, Artificial Sequence
  Description of Artificial Sequence:  Enzymatic Nucleic Acid
  misc_feature (31)..(31): n stands for inosine
cgauaacccugaugaggccguuaggccgaangacaaau

SEQ ID NO: 3309 - RNA, 38 nt, Artificial Sequence
  Description of Artificial Sequence:  Enzymatic Nucleic Acid
  misc_feature (31)..(31): n stands for inosine
acacaucccugaugaggccguuaggccgaancgauaac

SEQ ID NO: 3310 - RNA, 38 nt, Artificial Sequence
  Description of Artificial Sequence:  Enzymatic Nucleic Acid
  misc_feature (31)..(31): n stands for inosine
aacgccgccugaugaggccguuaggccgaanacacauc

SEQ ID NO: 3311 - RNA, 38 nt, Artificial Sequence
  Description of Artificial Sequence:  Enzymatic Nucleic Acid
  misc_feature (31)..(31): n stands for inosine
gaggaagacugaugaggccguuaggccgaanauaaaac

SEQ ID NO: 3312 - RNA, 38 nt, Artificial Sequence
  Description of Artificial Sequence:  Enzymatic Nucleic Acid
  misc_feature (31)..(31): n stands for inosine
gcagaggacugaugaggccguuaggccgaanaugauaa

SEQ ID NO: 3313 - RNA, 38 nt, Artificial Sequence
  Description of Artificial Sequence:  Enzymatic Nucleic Acid
  misc_feature (31)..(31): n stands for inosine
gaugcagacugaugaggccguuaggccgaanaagauga

SEQ ID NO: 3314 - RNA, 38 nt, Artificial Sequence
  Description of Artificial Sequence:  Enzymatic Nucleic Acid
  misc_feature (31)..(31): n stands for inosine
ggaugcagcugaugaggccguuaggccgaangaagaug

SEQ ID NO: 3315 - RNA, 38 nt, Artificial Sequence
  Description of Artificial Sequence:  Enzymatic Nucleic Acid
  misc_feature (31)..(31): n stands for inosine
caggaugccugaugaggccguuaggccgaanaggaaga

SEQ ID NO: 3316 - RNA, 38 nt, Artificial Sequence
  Description of Artificial Sequence:  Enzymatic Nucleic Acid
  misc_feature (31)..(31): n stands for inosine
cagcaggacugaugaggccguuaggccgaancagagga

SEQ ID NO: 3317 - RNA, 38 nt, Artificial Sequence
  Description of Artificial Sequence:  Enzymatic Nucleic Acid
  misc_feature (31)..(31): n stands for inosine
uagcagcacugaugaggccguuaggccgaanaugcaga

SEQ ID NO: 3318 - RNA, 38 nt, Artificial Sequence
  Description of Artificial Sequence:  Enzymatic Nucleic Acid
  misc_feature (31)..(31): n stands for inosine
auagcagccugaugaggccguuaggccgaangaugcag

SEQ ID NO: 3319 - RNA, 38 nt, Artificial Sequence
  Description of Artificial Sequence:  Enzymatic Nucleic Acid
  misc_feature (31)..(31): n stands for inosine
ggcauagccugaugaggccguuaggccgaancaggaug

SEQ ID NO: 3320 - RNA, 38 nt, Artificial Sequence
  Description of Artificial Sequence:  Enzymatic Nucleic Acid
  misc_feature (31)..(31): n stands for inosine
ugaggcaucugaugaggccguuaggccgaancagcagg

SEQ ID NO: 3321 - RNA, 38 nt, Artificial Sequence
  Description of Artificial Sequence:  Enzymatic Nucleic Acid
  misc_feature (31)..(31): n stands for inosine
gaagaugacugaugaggccguuaggccgaancauagca

SEQ ID NO: 3322 - RNA, 38 nt, Artificial Sequence
  Description of Artificial Sequence:  Enzymatic Nucleic Acid
  misc_feature (31)..(31): n stands for inosine
agaagaugcugaugaggccguuaggccgaangcauagc

SEQ ID NO: 3323 - RNA, 38 nt, Artificial Sequence
  Description of Artificial Sequence:  Enzymatic Nucleic Acid
  misc_feature (31)..(31): n stands for inosine
caagaagacugaugaggccguuaggccgaanaggcaua

SEQ ID NO: 3324 - RNA, 38 nt, Artificial Sequence
  Description of Artificial Sequence:  Enzymatic Nucleic Acid
  misc_feature (31)..(31): n stands for inosine
caacaagacugaugaggccguuaggccgaanaugaggc

SEQ ID NO: 3325 - RNA, 38 nt, Artificial Sequence
  Description of Artificial Sequence:  Enzymatic Nucleic Acid
  misc_feature (31)..(31): n stands for inosine
aaccaacacugaugaggccguuaggccgaanaagauga

SEQ ID NO: 3326 - RNA, 38 nt, Artificial Sequence
  Description of Artificial Sequence:  Enzymatic Nucleic Acid
  misc_feature (31)..(31): n stands for inosine
aguccagacugaugaggccguuaggccgaanaaccaac

SEQ ID NO: 3327 - RNA, 38 nt, Artificial Sequence
  Description of Artificial Sequence:  Enzymatic Nucleic Acid
  misc_feature (31)..(31): n stands for inosine
gauagucccugaugaggccguuaggccgaanaagaacc

SEQ ID NO: 3328 - RNA, 38 nt, Artificial Sequence
  Description of Artificial Sequence:  Enzymatic Nucleic Acid
  misc_feature (31)..(31): n stands for inosine
accuugaucugaugaggccguuaggccgaanuccagaa

SEQ ID NO: 3329 - RNA, 38 nt, Artificial Sequence
  Description of Artificial Sequence:  Enzymatic Nucleic Acid
  misc_feature (31)..(31): n stands for inosine
acauaccucugaugaggccguuaggccgaanauagucc

SEQ ID NO: 3330 - RNA, 38 nt, Artificial Sequence
  Description of Artificial Sequence:  Enzymatic Nucleic Acid
  misc_feature (31)..(31): n stands for inosine
gacaaacgcugaugaggccguuaggccgaancaacaua

SEQ ID NO: 3331 - RNA, 38 nt, Artificial Sequence
  Description of Artificial Sequence:  Enzymatic Nucleic Acid
  misc_feature (31)..(31): n stands for inosine
ggacaaaccugaugaggccguuaggccgaangcaacau

SEQ ID NO: 3332 - RNA, 38 nt, Artificial Sequence
  Description of Artificial Sequence:  Enzymatic Nucleic Acid
  misc_feature (31)..(31): n stands for inosine
gaauuagacugaugaggccguuaggccgaanacaaacg

SEQ ID NO: 3333 - RNA, 38 nt, Artificial Sequence
  Description of Artificial Sequence:  Enzymatic Nucleic Acid
  misc_feature (31)..(31): n stands for inosine
ggaauuagcugaugaggccguuaggccgaangacaaac

SEQ ID NO: 3334 - RNA, 38 nt, Artificial Sequence
  Description of Artificial Sequence:  Enzymatic Nucleic Acid
  misc_feature (31)..(31): n stands for inosine
cuggaauucugaugaggccguuaggccgaanaggacaa

SEQ ID NO: 3335 - RNA, 38 nt, Artificial Sequence
  Description of Artificial Sequence:  Enzymatic Nucleic Acid
  misc_feature (31)..(31): n stands for inosine
augauccucugaugaggccguuaggccgaanaauuaga

SEQ ID NO: 3336 - RNA, 38 nt, Artificial Sequence
  Description of Artificial Sequence:  Enzymatic Nucleic Acid
  misc_feature (31)..(31): n stands for inosine
gaugaucccugaugaggccguuaggccgaangaauuag

SEQ ID NO: 3337 - RNA, 38 nt, Artificial Sequence
  Description of Artificial Sequence:  Enzymatic Nucleic Acid
  misc_feature (31)..(31): n stands for inosine
guuguugacugaugaggccguuaggccgaanauccugg

SEQ ID NO: 3338 - RNA, 38 nt, Artificial Sequence
  Description of Artificial Sequence:  Enzymatic Nucleic Acid
  misc_feature (31)..(31): n stands for inosine
cugguugucugaugaggccguuaggccgaanaugaucc

SEQ ID NO: 3339 - RNA, 38 nt, Artificial Sequence
  Description of Artificial Sequence:  Enzymatic Nucleic Acid
  misc_feature (31)..(31): n stands for inosine
gugcuggucugaugaggccguuaggccgaanuugauga

SEQ ID NO: 3340 - RNA, 38 nt, Artificial Sequence
  Description of Artificial Sequence:  Enzymatic Nucleic Acid
  misc_feature (31)..(31): n stands for inosine
ccggugcucugaugaggccguuaggccgaanuuguuga

SEQ ID NO: 3341 - RNA, 38 nt, Artificial Sequence
  Description of Artificial Sequence:  Enzymatic Nucleic Acid
  misc_feature (31)..(31): n stands for inosine
uccggugccugaugaggccguuaggccgaanguuguug

SEQ ID NO: 3342 - RNA, 38 nt, Artificial Sequence
  Description of Artificial Sequence:  Enzymatic Nucleic Acid
  misc_feature (31)..(31): n stands for inosine
ugguccggcugaugaggccguuaggccgaancugguug

SEQ ID NO: 3343 - RNA, 38 nt, Artificial Sequence
  Description of Artificial Sequence:  Enzymatic Nucleic Acid
  misc_feature (31)..(31): n stands for inosine
cauggucccugaugaggccguuaggccgaanugcuggu

SEQ ID NO: 3344 - RNA, 38 nt, Artificial Sequence
  Description of Artificial Sequence:  Enzymatic Nucleic Acid
  misc_feature (31)..(31): n stands for inosine
uuuugcaucugaugaggccguuaggccgaanuccggug

SEQ ID NO: 3345 - RNA, 38 nt, Artificial Sequence
  Description of Artificial Sequence:  Enzymatic Nucleic Acid
  misc_feature (31)..(31): n stands for inosine
guuuugcacugaugaggccguuaggccgaanguccggu

SEQ ID NO: 3346 - RNA, 38 nt, Artificial Sequence
  Description of Artificial Sequence:  Enzymatic Nucleic Acid
  misc_feature (31)..(31): n stands for inosine
gcagguuucugaugaggccguuaggccgaancaugguc

SEQ ID NO: 3347 - RNA, 38 nt, Artificial Sequence
  Description of Artificial Sequence:  Enzymatic Nucleic Acid
  misc_feature (31)..(31): n stands for inosine
guugugcacugaugaggccguuaggccgaanuuuugca

SEQ ID NO: 3348 - RNA, 38 nt, Artificial Sequence
  Description of Artificial Sequence:  Enzymatic Nucleic Acid
  misc_feature (31)..(31): n stands for inosine
aguugugccugaugaggccguuaggccgaanguuuugc

SEQ ID NO: 3349 - RNA, 38 nt, Artificial Sequence
  Description of Artificial Sequence:  Enzymatic Nucleic Acid
  misc_feature (31)..(31): n stands for inosine
aggaguugcugaugaggccguuaggccgaancagguuu

SEQ ID NO: 3350 - RNA, 38 nt, Artificial Sequence
  Description of Artificial Sequence:  Enzymatic Nucleic Acid
  misc_feature (31)..(31): n stands for inosine
gcaggagucugaugaggccguuaggccgaanugcaggu

SEQ ID NO: 3351 - RNA, 38 nt, Artificial Sequence
  Description of Artificial Sequence:  Enzymatic Nucleic Acid
  misc_feature (31)..(31): n stands for inosine
ugagcaggcugaugaggccguuaggccgaanuugugca

SEQ ID NO: 3352 - RNA, 38 nt, Artificial Sequence
  Description of Artificial Sequence:  Enzymatic Nucleic Acid
  misc_feature (31)..(31): n stands for inosine
cuugagcacugaugaggccguuaggccgaanaguugug

SEQ ID NO: 3353 - RNA, 38 nt, Artificial Sequence
  Description of Artificial Sequence:  Enzymatic Nucleic Acid
  misc_feature (31)..(31): n stands for inosine
ccuugagccugaugaggccguuaggccgaangaguugu

SEQ ID NO: 3354 - RNA, 38 nt, Artificial Sequence
  Description of Artificial Sequence:  Enzymatic Nucleic Acid
  misc_feature (31)..(31): n stands for inosine
guuccuugcugaugaggccguuaggccgaancaggagu

SEQ ID NO: 3355 - RNA, 38 nt, Artificial Sequence
  Description of Artificial Sequence:  Enzymatic Nucleic Acid
  misc_feature (31)..(31): n stands for inosine
agguuccucugaugaggccguuaggccgaanagcagga

SEQ ID NO: 3356 - RNA, 38 nt, Artificial Sequence
  Description of Artificial Sequence:  Enzymatic Nucleic Acid
  misc_feature (31)..(31): n stands for inosine
aacauagacugaugaggccguuaggccgaanuuccuug

SEQ ID NO: 3357 - RNA, 38 nt, Artificial Sequence
  Description of Artificial Sequence:  Enzymatic Nucleic Acid
  misc_feature (31)..(31): n stands for inosine
aaacauagcugaugaggccguuaggccgaanguuccuu

SEQ ID NO: 3358 - RNA, 38 nt, Artificial Sequence
  Description of Artificial Sequence:  Enzymatic Nucleic Acid
  misc_feature (31)..(31): n stands for inosine
ggaaacaucugaugaggccguuaggccgaanagguucc

SEQ ID NO: 3359 - RNA, 38 nt, Artificial Sequence
  Description of Artificial Sequence:  Enzymatic Nucleic Acid
  misc_feature (31)..(31): n stands for inosine
aacaugagcugaugaggccguuaggccgaanaaacaua

SEQ ID NO: 3360 - RNA, 38 nt, Artificial Sequence
  Description of Artificial Sequence:  Enzymatic Nucleic Acid
  misc_feature (31)..(31): n stands for inosine
caacaugacugaugaggccguuaggccgaangaaacau

SEQ ID NO: 3361 - RNA, 38 nt, Artificial Sequence
  Description of Artificial Sequence:  Enzymatic Nucleic Acid
  misc_feature (31)..(31): n stands for inosine
gcaacaugcugaugaggccguuaggccgaanggaaaca

SEQ ID NO: 3362 - RNA, 38 nt, Artificial Sequence
  Description of Artificial Sequence:  Enzymatic Nucleic Acid
  misc_feature (31)..(31): n stands for inosine
cagcaacacugaugaggccguuaggccgaanagggaaa

SEQ ID NO: 3363 - RNA, 38 nt, Artificial Sequence
  Description of Artificial Sequence:  Enzymatic Nucleic Acid
  misc_feature (31)..(31): n stands for inosine
uuuuguaccugaugaggccguuaggccgaancaacaug

SEQ ID NO: 3364 - RNA, 38 nt, Artificial Sequence
  Description of Artificial Sequence:  Enzymatic Nucleic Acid
  misc_feature (31)..(31): n stands for inosine
guagguuucugaugaggccguuaggccgaanuacagca

SEQ ID NO: 3365 - RNA, 38 nt, Artificial Sequence
  Description of Artificial Sequence:  Enzymatic Nucleic Acid
  misc_feature (31)..(31): n stands for inosine
cguccguacugaugaggccguuaggccgaanuuuugua

SEQ ID NO: 3366 - RNA, 38 nt, Artificial Sequence
  Description of Artificial Sequence:  Enzymatic Nucleic Acid
  misc_feature (31)..(31): n stands for inosine
ccguccgucugaugaggccguuaggccgaanguuuugu

SEQ ID NO: 3367 - RNA, 38 nt, Artificial Sequence
  Description of Artificial Sequence:  Enzymatic Nucleic Acid
  misc_feature (31)..(31): n stands for inosine
acaggugccugaugaggccguuaggccgaanuuuccgu

SEQ ID NO: 3368 - RNA, 38 nt, Artificial Sequence
  Description of Artificial Sequence:  Enzymatic Nucleic Acid
  misc_feature (31)..(31): n stands for inosine
aauacaggcugaugaggccguuaggccgaancaguuuc

SEQ ID NO: 3369 - RNA, 38 nt, Artificial Sequence
  Description of Artificial Sequence:  Enzymatic Nucleic Acid
  misc_feature (31)..(31): n stands for inosine
ggaauacacugaugaggccguuaggccgaanugcaguu

SEQ ID NO: 3370 - RNA, 38 nt, Artificial Sequence
  Description of Artificial Sequence:  Enzymatic Nucleic Acid
  misc_feature (31)..(31): n stands for inosine
gggaauaccugaugaggccguuaggccgaangugcagu

SEQ ID NO: 3371 - RNA, 38 nt, Artificial Sequence
  Description of Artificial Sequence:  Enzymatic Nucleic Acid
  misc_feature (31)..(31): n stands for inosine
augggaugcugaugaggccguuaggccgaanaauacag

SEQ ID NO: 3372 - RNA, 38 nt, Artificial Sequence
  Description of Artificial Sequence:  Enzymatic Nucleic Acid
  misc_feature (31)..(31): n stands for inosine
gaugggaucugaugaggccguuaggccgaangaauaca

SEQ ID NO: 3373 - RNA, 38 nt, Artificial Sequence
  Description of Artificial Sequence:  Enzymatic Nucleic Acid
  misc_feature (31)..(31): n stands for inosine
ugaugggacugaugaggccguuaggccgaanggaauac

SEQ ID NO: 3374 - RNA, 38 nt, Artificial Sequence
  Description of Artificial Sequence:  Enzymatic Nucleic Acid
  misc_feature (31)..(31): n stands for inosine
agaugaugcugaugaggccguuaggccgaanaugggaa

SEQ ID NO: 3375 - RNA, 38 nt, Artificial Sequence
  Description of Artificial Sequence:  Enzymatic Nucleic Acid
  misc_feature (31)..(31): n stands for inosine
aagaugaucugaugaggccguuaggccgaangauggga

SEQ ID NO: 3376 - RNA, 38 nt, Artificial Sequence
  Description of Artificial Sequence:  Enzymatic Nucleic Acid
  misc_feature (31)..(31): n stands for inosine
caagaugacugaugaggccguuaggccgaanggauggg

SEQ ID NO: 3377 - RNA, 38 nt, Artificial Sequence
  Description of Artificial Sequence:  Enzymatic Nucleic Acid
  misc_feature (31)..(31): n stands for inosine
gcccaagacugaugaggccguuaggccgaanaugggau

SEQ ID NO: 3378 - RNA, 38 nt, Artificial Sequence
  Description of Artificial Sequence:  Enzymatic Nucleic Acid
  misc_feature (31)..(31): n stands for inosine
aaagcccacugaugaggccguuaggccgaanaugaugg

SEQ ID NO: 3379 - RNA, 38 nt, Artificial Sequence
  Description of Artificial Sequence:  Enzymatic Nucleic Acid
  misc_feature (31)..(31): n stands for inosine
uuugcgaacugaugaggccguuaggccgaancccaaga

SEQ ID NO: 3380 - RNA, 38 nt, Artificial Sequence
  Description of Artificial Sequence:  Enzymatic Nucleic Acid
  misc_feature (31)..(31): n stands for inosine
agguauuucugaugaggccguuaggccgaancgaaagc

SEQ ID NO: 3381 - RNA, 38 nt, Artificial Sequence
  Description of Artificial Sequence:  Enzymatic Nucleic Acid
  misc_feature (31)..(31): n stands for inosine
cucccauacugaugaggccguuaggccgaanuauuuug

SEQ ID NO: 3382 - RNA, 38 nt, Artificial Sequence
  Description of Artificial Sequence:  Enzymatic Nucleic Acid
  misc_feature (31)..(31): n stands for inosine
acucccaucugaugaggccguuaggccgaanguauuuu

SEQ ID NO: 3383 - RNA, 38 nt, Artificial Sequence
  Description of Artificial Sequence:  Enzymatic Nucleic Acid
  misc_feature (31)..(31): n stands for inosine
cggacugacugaugaggccguuaggccgaancccacuc

SEQ ID NO: 3384 - RNA, 38 nt, Artificial Sequence
  Description of Artificial Sequence:  Enzymatic Nucleic Acid
  misc_feature (31)..(31): n stands for inosine
acggacugcugaugaggccguuaggccgaangcccacu

SEQ ID NO: 3385 - RNA, 38 nt, Artificial Sequence
  Description of Artificial Sequence:  Enzymatic Nucleic Acid
  misc_feature (31)..(31): n stands for inosine
aaacggaccugaugaggccguuaggccgaanaggccca

SEQ ID NO: 3386 - RNA, 38 nt, Artificial Sequence
  Description of Artificial Sequence:  Enzymatic Nucleic Acid
  misc_feature (31)..(31): n stands for inosine
agagaaaccugaugaggccguuaggccgaanacugagg

SEQ ID NO: 3387 - RNA, 38 nt, Artificial Sequence
  Description of Artificial Sequence:  Enzymatic Nucleic Acid
  misc_feature (31)..(31): n stands for inosine
gagccaagcugaugaggccguuaggccgaanaaacgga

SEQ ID NO: 3388 - RNA, 38 nt, Artificial Sequence
  Description of Artificial Sequence:  Enzymatic Nucleic Acid
  misc_feature (31)..(31): n stands for inosine
cugagccacugaugaggccguuaggccgaanagaaacg

SEQ ID NO: 3389 - RNA, 38 nt, Artificial Sequence
  Description of Artificial Sequence:  Enzymatic Nucleic Acid
  misc_feature (31)..(31): n stands for inosine
guaaacugcugaugaggccguuaggccgaanccaagag

SEQ ID NO: 3390 - RNA, 38 nt, Artificial Sequence
  Description of Artificial Sequence:  Enzymatic Nucleic Acid
  misc_feature (31)..(31): n stands for inosine
uaguaaaccugaugaggccguuaggccgaanagccaag

SEQ ID NO: 3391 - RNA, 38 nt, Artificial Sequence
  Description of Artificial Sequence:  Enzymatic Nucleic Acid
  misc_feature (31)..(31): n stands for inosine
auggcacucugaugaggccguuaggccgaanuaaacug

SEQ ID NO: 3392 - RNA, 38 nt, Artificial Sequence
  Description of Artificial Sequence:  Enzymatic Nucleic Acid
  misc_feature (31)..(31): n stands for inosine
gaacaaaucugaugaggccguuaggccgaancacuagu

SEQ ID NO: 3393 - RNA, 38 nt, Artificial Sequence
  Description of Artificial Sequence:  Enzymatic Nucleic Acid
  misc_feature (31)..(31): n stands for inosine
ugaacaaacugaugaggccguuaggccgaangcacuag

SEQ ID NO: 3394 - RNA, 38 nt, Artificial Sequence
  Description of Artificial Sequence:  Enzymatic Nucleic Acid
  misc_feature (31)..(31): n stands for inosine
cgaaccaccugaugaggccguuaggccgaanaacaaau

SEQ ID NO: 3395 - RNA, 38 nt, Artificial Sequence
  Description of Artificial Sequence:  Enzymatic Nucleic Acid
  misc_feature (31)..(31): n stands for inosine
ugggggaacugaugaggccguuaggccgaancccuacg

SEQ ID NO: 3396 - RNA, 38 nt, Artificial Sequence
  Description of Artificial Sequence:  Enzymatic Nucleic Acid
  misc_feature (31)..(31): n stands for inosine
acagugggcugaugaggccguuaggccgaanaaagccc

SEQ ID NO: 3397 - RNA, 38 nt, Artificial Sequence
  Description of Artificial Sequence:  Enzymatic Nucleic Acid
  misc_feature (31)..(31): n stands for inosine
gacaguggcugaugaggccguuaggccgaangaaagcc

SEQ ID NO: 3398 - RNA, 38 nt, Artificial Sequence
  Description of Artificial Sequence:  Enzymatic Nucleic Acid
  misc_feature (31)..(31): n stands for inosine
agacagugcugaugaggccguuaggccgaanggaaagc

SEQ ID NO: 3399 - RNA, 38 nt, Artificial Sequence
  Description of Artificial Sequence:  Enzymatic Nucleic Acid
  misc_feature (31)..(31): n stands for inosine
cagacagucugaugaggccguuaggccgaangggaaag

SEQ ID NO: 3400 - RNA, 38 nt, Artificial Sequence
  Description of Artificial Sequence:  Enzymatic Nucleic Acid
  misc_feature (31)..(31): n stands for inosine
ccagacagcugaugaggccguuaggccgaanggggaaa

SEQ ID NO: 3401 - RNA, 38 nt, Artificial Sequence
  Description of Artificial Sequence:  Enzymatic Nucleic Acid
  misc_feature (31)..(31): n stands for inosine
agccagaccugaugaggccguuaggccgaanuggggga

SEQ ID NO: 3402 - RNA, 38 nt, Artificial Sequence
  Description of Artificial Sequence:  Enzymatic Nucleic Acid
  misc_feature (31)..(31): n stands for inosine
ugaaagcccugaugaggccguuaggccgaanacagugg

SEQ ID NO: 3403 - RNA, 38 nt, Artificial Sequence
  Description of Artificial Sequence:  Enzymatic Nucleic Acid
  misc_feature (31)..(31): n stands for inosine
uaacugaacugaugaggccguuaggccgaanccagaca

SEQ ID NO: 3404 - RNA, 38 nt, Artificial Sequence
  Description of Artificial Sequence:  Enzymatic Nucleic Acid
  misc_feature (31)..(31): n stands for inosine
cauauaaccugaugaggccguuaggccgaanaaagcca

SEQ ID NO: 3405 - RNA, 38 nt, Artificial Sequence
  Description of Artificial Sequence:  Enzymatic Nucleic Acid
  misc_feature (31)..(31): n stands for inosine
acagacuucugaugaggccguuaggccgaancccccaa

SEQ ID NO: 3406 - RNA, 38 nt, Artificial Sequence
  Description of Artificial Sequence:  Enzymatic Nucleic Acid
  misc_feature (31)..(31): n stands for inosine
uacagacucugaugaggccguuaggccgaangccccca

SEQ ID NO: 3407 - RNA, 38 nt, Artificial Sequence
  Description of Artificial Sequence:  Enzymatic Nucleic Acid
  misc_feature (31)..(31): n stands for inosine
uguuguaccugaugaggccguuaggccgaanacuuggc

SEQ ID NO: 3408 - RNA, 38 nt, Artificial Sequence
  Description of Artificial Sequence:  Enzymatic Nucleic Acid
  misc_feature (31)..(31): n stands for inosine
caagaugucugaugaggccguuaggccgaanuacagac

SEQ ID NO: 3409 - RNA, 38 nt, Artificial Sequence
  Description of Artificial Sequence:  Enzymatic Nucleic Acid
  misc_feature (31)..(31): n stands for inosine
acucaagacugaugaggccguuaggccgaanuuguaca

SEQ ID NO: 3410 - RNA, 38 nt, Artificial Sequence
  Description of Artificial Sequence:  Enzymatic Nucleic Acid
  misc_feature (31)..(31): n stands for inosine
gggacucacugaugaggccguuaggccgaanauguugu

SEQ ID NO: 3411 - RNA, 38 nt, Artificial Sequence
  Description of Artificial Sequence:  Enzymatic Nucleic Acid
  misc_feature (31)..(31): n stands for inosine
gcauaaagcugaugaggccguuaggccgaanacucaag

SEQ ID NO: 3412 - RNA, 38 nt, Artificial Sequence
  Description of Artificial Sequence:  Enzymatic Nucleic Acid
  misc_feature (31)..(31): n stands for inosine
ggcauaaacugaugaggccguuaggccgaangacucaa

SEQ ID NO: 3413 - RNA, 38 nt, Artificial Sequence
  Description of Artificial Sequence:  Enzymatic Nucleic Acid
  misc_feature (31)..(31): n stands for inosine
cggcauaacugaugaggccguuaggccgaanggacuca

SEQ ID NO: 3414 - RNA, 38 nt, Artificial Sequence
  Description of Artificial Sequence:  Enzymatic Nucleic Acid
  misc_feature (31)..(31): n stands for inosine
guaacagccugaugaggccguuaggccgaancauaaag

SEQ ID NO: 3415 - RNA, 38 nt, Artificial Sequence
  Description of Artificial Sequence:  Enzymatic Nucleic Acid
  misc_feature (31)..(31): n stands for inosine
uugguaaccugaugaggccguuaggccgaancggcaua

SEQ ID NO: 3416 - RNA, 38 nt, Artificial Sequence
  Description of Artificial Sequence:  Enzymatic Nucleic Acid
  misc_feature (31)..(31): n stands for inosine
agaaaauucugaugaggccguuaggccgaanuaacagc

SEQ ID NO: 3417 - RNA, 38 nt, Artificial Sequence
  Description of Artificial Sequence:  Enzymatic Nucleic Acid
  misc_feature (31)..(31): n stands for inosine
aagaaaaucugaugaggccguuaggccgaanguaacag

SEQ ID NO: 3418 - RNA, 38 nt, Artificial Sequence
  Description of Artificial Sequence:  Enzymatic Nucleic Acid
  misc_feature (31)..(31): n stands for inosine
aagacaaacugaugaggccguuaggccgaanaaaauug

SEQ ID NO: 3419 - RNA, 38 nt, Artificial Sequence
  Description of Artificial Sequence:  Enzymatic Nucleic Acid
  misc_feature (31)..(31): n stands for inosine
auacccaacugaugaggccguuaggccgaanacaaaag

SEQ ID NO: 3420 - RNA, 38 nt, Artificial Sequence
  Description of Artificial Sequence:  Enzymatic Nucleic Acid
  misc_feature (31)..(31): n stands for inosine
gguuuaaacugaugaggccguuaggccgaanuauaccc

SEQ ID NO: 3421 - RNA, 38 nt, Artificial Sequence
  Description of Artificial Sequence:  Enzymatic Nucleic Acid
  misc_feature (31)..(31): n stands for inosine
uuugugagcugaugaggccguuaggccgaanuuuaaau

SEQ ID NO: 3422 - RNA, 38 nt, Artificial Sequence
  Description of Artificial Sequence:  Enzymatic Nucleic Acid
  misc_feature (31)..(31): n stands for inosine
uuuugugacugaugaggccguuaggccgaanguuuaaa

SEQ ID NO: 3423 - RNA, 38 nt, Artificial Sequence
  Description of Artificial Sequence:  Enzymatic Nucleic Acid
  misc_feature (31)..(31): n stands for inosine
guuuugugcugaugaggccguuaggccgaangguuuaa

SEQ ID NO: 3424 - RNA, 38 nt, Artificial Sequence
  Description of Artificial Sequence:  Enzymatic Nucleic Acid
  misc_feature (31)..(31): n stands for inosine
uuguuuugcugaugaggccguuaggccgaanaggguuu

SEQ ID NO: 3425 - RNA, 38 nt, Artificial Sequence
  Description of Artificial Sequence:  Enzymatic Nucleic Acid
  misc_feature (31)..(31): n stands for inosine
uuuuguuucugaugaggccguuaggccgaanugagggu

SEQ ID NO: 3426 - RNA, 38 nt, Artificial Sequence
  Description of Artificial Sequence:  Enzymatic Nucleic Acid
  misc_feature (31)..(31): n stands for inosine
caucuuuucugaugaggccguuaggccgaanuuuugug

SEQ ID NO: 3427 - RNA, 38 nt, Artificial Sequence
  Description of Artificial Sequence:  Enzymatic Nucleic Acid
  misc_feature (31)..(31): n stands for inosine
aaguuaagcugaugaggccguuaggccgaanaauaucc

SEQ ID NO: 3428 - RNA, 38 nt, Artificial Sequence
  Description of Artificial Sequence:  Enzymatic Nucleic Acid
  misc_feature (31)..(31): n stands for inosine
gaaguuaacugaugaggccguuaggccgaangaauauc

SEQ ID NO: 3429 - RNA, 38 nt, Artificial Sequence
  Description of Artificial Sequence:  Enzymatic Nucleic Acid
  misc_feature (31)..(31): n stands for inosine
ugaaguuacugaugaggccguuaggccgaanggaauau

SEQ ID NO: 3430 - RNA, 38 nt, Artificial Sequence
  Description of Artificial Sequence:  Enzymatic Nucleic Acid
  misc_feature (31)..(31): n stands for inosine
ucccaugacugaugaggccguuaggccgaanuuaaggg

SEQ ID NO: 3431 - RNA, 38 nt, Artificial Sequence
  Description of Artificial Sequence:  Enzymatic Nucleic Acid
  misc_feature (31)..(31): n stands for inosine
auaucccacugaugaggccguuaggccgaanaaguuaa

SEQ ID NO: 3432 - RNA, 38 nt, Artificial Sequence
  Description of Artificial Sequence:  Enzymatic Nucleic Acid
  misc_feature (31)..(31): n stands for inosine
uggcaaugcugaugaggccguuaggccgaanccccaac

SEQ ID NO: 3433 - RNA, 38 nt, Artificial Sequence
  Description of Artificial Sequence:  Enzymatic Nucleic Acid
  misc_feature (31)..(31): n stands for inosine
uguggcaacugaugaggccguuaggccgaanugcccca

SEQ ID NO: 3434 - RNA, 38 nt, Artificial Sequence
  Description of Artificial Sequence:  Enzymatic Nucleic Acid
  misc_feature (31)..(31): n stands for inosine
guuccugucugaugaggccguuaggccgaancaaugug

SEQ ID NO: 3435 - RNA, 38 nt, Artificial Sequence
  Description of Artificial Sequence:  Enzymatic Nucleic Acid
  misc_feature (31)..(31): n stands for inosine
uguuccugcugaugaggccguuaggccgaangcaaugu

SEQ ID NO: 3436 - RNA, 38 nt, Artificial Sequence
  Description of Artificial Sequence:  Enzymatic Nucleic Acid
  misc_feature (31)..(31): n stands for inosine
uauguucccugaugaggccguuaggccgaanuggcaau

SEQ ID NO: 3437 - RNA, 38 nt, Artificial Sequence
  Description of Artificial Sequence:  Enzymatic Nucleic Acid
  misc_feature (31)..(31): n stands for inosine
guacaauacugaugaggccguuaggccgaanuuccugu

SEQ ID NO: 3438 - RNA, 38 nt, Artificial Sequence
  Description of Artificial Sequence:  Enzymatic Nucleic Acid
  misc_feature (31)..(31): n stands for inosine
ugauuuuucugaugaggccguuaggccgaanuacaaua

SEQ ID NO: 3439 - RNA, 38 nt, Artificial Sequence
  Description of Artificial Sequence:  Enzymatic Nucleic Acid
  misc_feature (31)..(31): n stands for inosine
acacauuucugaugaggccguuaggccgaanauuuuuu

SEQ ID NO: 3440 - RNA, 38 nt, Artificial Sequence
  Description of Artificial Sequence:  Enzymatic Nucleic Acid
  misc_feature (31)..(31): n stands for inosine
uuacaggacugaugaggccguuaggccgaanuuuccua

SEQ ID NO: 3441 - RNA, 38 nt, Artificial Sequence
  Description of Artificial Sequence:  Enzymatic Nucleic Acid
  misc_feature (31)..(31): n stands for inosine
uguuuacacugaugaggccguuaggccgaanaaguuuc

SEQ ID NO: 3442 - RNA, 38 nt, Artificial Sequence
  Description of Artificial Sequence:  Enzymatic Nucleic Acid
  misc_feature (31)..(31): n stands for inosine
cuguuuaccugaugaggccguuaggccgaangaaguuu

SEQ ID NO: 3443 - RNA, 38 nt, Artificial Sequence
  Description of Artificial Sequence:  Enzymatic Nucleic Acid
  misc_feature (31)..(31): n stands for inosine
aauaggcccugaugaggccguuaggccgaanuuuacag

SEQ ID NO: 3444 - RNA, 38 nt, Artificial Sequence
  Description of Artificial Sequence:  Enzymatic Nucleic Acid
  misc_feature (31)..(31): n stands for inosine
aaucaauacugaugaggccguuaggccgaanccuguuu

SEQ ID NO: 3445 - RNA, 38 nt, Artificial Sequence
  Description of Artificial Sequence:  Enzymatic Nucleic Acid
  misc_feature (31)..(31): n stands for inosine
caaucaaucugaugaggccguuaggccgaangccuguu

SEQ ID NO: 3446 - RNA, 38 nt, Artificial Sequence
  Description of Artificial Sequence:  Enzymatic Nucleic Acid
  misc_feature (31)..(31): n stands for inosine
caauucgucugaugaggccguuaggccgaanacauacu

SEQ ID NO: 3447 - RNA, 38 nt, Artificial Sequence
  Description of Artificial Sequence:  Enzymatic Nucleic Acid
  misc_feature (31)..(31): n stands for inosine
accccaaacugaugaggccguuaggccgaanacccaca

SEQ ID NO: 3448 - RNA, 38 nt, Artificial Sequence
  Description of Artificial Sequence:  Enzymatic Nucleic Acid
  misc_feature (31)..(31): n stands for inosine
aaaggggccugaugaggccguuaggccgaancaaaccc

SEQ ID NO: 3449 - RNA, 38 nt, Artificial Sequence
  Description of Artificial Sequence:  Enzymatic Nucleic Acid
  misc_feature (31)..(31): n stands for inosine
gugaaaggcugaugaggccguuaggccgaancggcaaa

SEQ ID NO: 3450 - RNA, 38 nt, Artificial Sequence
  Description of Artificial Sequence:  Enzymatic Nucleic Acid
  misc_feature (31)..(31): n stands for inosine
cgugaaagcugaugaggccguuaggccgaangcggcaa

SEQ ID NO: 3451 - RNA, 38 nt, Artificial Sequence
  Description of Artificial Sequence:  Enzymatic Nucleic Acid
  misc_feature (31)..(31): n stands for inosine
gcgugaaacugaugaggccguuaggccgaanggcggca

SEQ ID NO: 3452 - RNA, 38 nt, Artificial Sequence
  Description of Artificial Sequence:  Enzymatic Nucleic Acid
  misc_feature (31)..(31): n stands for inosine
ugcgugaacugaugaggccguuaggccgaangggcggc

SEQ ID NO: 3453 - RNA, 38 nt, Artificial Sequence
  Description of Artificial Sequence:  Enzymatic Nucleic Acid
  misc_feature (31)..(31): n stands for inosine
acauugcgcugaugaggccguuaggccgaanaaagggg

SEQ ID NO: 3454 - RNA, 38 nt, Artificial Sequence
  Description of Artificial Sequence:  Enzymatic Nucleic Acid
  misc_feature (31)..(31): n stands for inosine
auccacaucugaugaggccguuaggccgaancgugaaa

SEQ ID NO: 3455 - RNA, 38 nt, Artificial Sequence
  Description of Artificial Sequence:  Enzymatic Nucleic Acid
  misc_feature (31)..(31): n stands for inosine
auuaaagccugaugaggccguuaggccgaanaauaucc

SEQ ID NO: 3456 - RNA, 38 nt, Artificial Sequence
  Description of Artificial Sequence:  Enzymatic Nucleic Acid
  misc_feature (31)..(31): n stands for inosine
ggcauuaacugaugaggccguuaggccgaancagaaua

SEQ ID NO: 3457 - RNA, 38 nt, Artificial Sequence
  Description of Artificial Sequence:  Enzymatic Nucleic Acid
  misc_feature (31)..(31): n stands for inosine
cauauaaacugaugaggccguuaggccgaancauuaaa

SEQ ID NO: 3458 - RNA, 38 nt, Artificial Sequence
  Description of Artificial Sequence:  Enzymatic Nucleic Acid
  misc_feature (31)..(31): n stands for inosine
gcauauaacugaugaggccguuaggccgaangcauuaa

SEQ ID NO: 3459 - RNA, 38 nt, Artificial Sequence
  Description of Artificial Sequence:  Enzymatic Nucleic Acid
  misc_feature (31)..(31): n stands for inosine
uguaugcacugaugaggccguuaggccgaancauauaa

SEQ ID NO: 3460 - RNA, 38 nt, Artificial Sequence
  Description of Artificial Sequence:  Enzymatic Nucleic Acid
  misc_feature (31)..(31): n stands for inosine
ugcuuguacugaugaggccguuaggccgaancaugcau

SEQ ID NO: 3461 - RNA, 38 nt, Artificial Sequence
  Description of Artificial Sequence:  Enzymatic Nucleic Acid
  misc_feature (31)..(31): n stands for inosine
guuuugcucugaugaggccguuaggccgaanuaugcau

SEQ ID NO: 3462 - RNA, 38 nt, Artificial Sequence
  Description of Artificial Sequence:  Enzymatic Nucleic Acid
  misc_feature (31)..(31): n stands for inosine
gccuguuucugaugaggccguuaggccgaancuuguau

SEQ ID NO: 3463 - RNA, 38 nt, Artificial Sequence
  Description of Artificial Sequence:  Enzymatic Nucleic Acid
  misc_feature (31)..(31): n stands for inosine
uaaaagcccugaugaggccguuaggccgaanuuuugcu

SEQ ID NO: 3464 - RNA, 38 nt, Artificial Sequence
  Description of Artificial Sequence:  Enzymatic Nucleic Acid
  misc_feature (31)..(31): n stands for inosine
aaaguaaacugaugaggccguuaggccgaanccuguuu

SEQ ID NO: 3465 - RNA, 38 nt, Artificial Sequence
  Description of Artificial Sequence:  Enzymatic Nucleic Acid
  misc_feature (31)..(31): n stands for inosine
ggcgagaacugaugaggccguuaggccgaanuaaaagc

SEQ ID NO: 3466 - RNA, 38 nt, Artificial Sequence
  Description of Artificial Sequence:  Enzymatic Nucleic Acid
  misc_feature (31)..(31): n stands for inosine
aguuggcgcugaugaggccguuaggccgaanaaaguaa

SEQ ID NO: 3467 - RNA, 38 nt, Artificial Sequence
  Description of Artificial Sequence:  Enzymatic Nucleic Acid
  misc_feature (31)..(31): n stands for inosine
uguaaguucugaugaggccguuaggccgaancgagaaa

SEQ ID NO: 3468 - RNA, 38 nt, Artificial Sequence
  Description of Artificial Sequence:  Enzymatic Nucleic Acid
  misc_feature (31)..(31): n stands for inosine
uuguaagucugaugaggccguuaggccgaangcgagaa

SEQ ID NO: 3469 - RNA, 38 nt, Artificial Sequence
  Description of Artificial Sequence:  Enzymatic Nucleic Acid
  misc_feature (31)..(31): n stands for inosine
gccuuguacugaugaggccguuaggccgaanuuggcga

SEQ ID NO: 3470 - RNA, 38 nt, Artificial Sequence
  Description of Artificial Sequence:  Enzymatic Nucleic Acid
  misc_feature (31)..(31): n stands for inosine
aaaggccucugaugaggccguuaggccgaanuaaguug

SEQ ID NO: 3471 - RNA, 38 nt, Artificial Sequence
  Description of Artificial Sequence:  Enzymatic Nucleic Acid
  misc_feature (31)..(31): n stands for inosine
cuuagaaacugaugaggccguuaggccgaanccuugua

SEQ ID NO: 3472 - RNA, 38 nt, Artificial Sequence
  Description of Artificial Sequence:  Enzymatic Nucleic Acid
  misc_feature (31)..(31): n stands for inosine
acuuagaacugaugaggccguuaggccgaangccuugu

SEQ ID NO: 3473 - RNA, 38 nt, Artificial Sequence
  Description of Artificial Sequence:  Enzymatic Nucleic Acid
  misc_feature (31)..(31): n stands for inosine
guuuacuucugaugaggccguuaggccgaanaaaggcc

SEQ ID NO: 3474 - RNA, 38 nt, Artificial Sequence
  Description of Artificial Sequence:  Enzymatic Nucleic Acid
  misc_feature (31)..(31): n stands for inosine
ucacauaccugaugaggccguuaggccgaanuuuacuu

SEQ ID NO: 3475 - RNA, 38 nt, Artificial Sequence
  Description of Artificial Sequence:  Enzymatic Nucleic Acid
  misc_feature (31)..(31): n stands for inosine
gggguaaacugaugaggccguuaggccgaanuucacau

SEQ ID NO: 3476 - RNA, 38 nt, Artificial Sequence
  Description of Artificial Sequence:  Enzymatic Nucleic Acid
  misc_feature (31)..(31): n stands for inosine
cgggguaacugaugaggccguuaggccgaanguucaca

SEQ ID NO: 3477 - RNA, 38 nt, Artificial Sequence
  Description of Artificial Sequence:  Enzymatic Nucleic Acid
  misc_feature (31)..(31): n stands for inosine
agcaacggcugaugaggccguuaggccgaanuaaaggu

SEQ ID NO: 3478 - RNA, 38 nt, Artificial Sequence
  Description of Artificial Sequence:  Enzymatic Nucleic Acid
  misc_feature (31)..(31): n stands for inosine
gagcaacgcugaugaggccguuaggccgaanguaaagg

SEQ ID NO: 3479 - RNA, 38 nt, Artificial Sequence
  Description of Artificial Sequence:  Enzymatic Nucleic Acid
  misc_feature (31)..(31): n stands for inosine
cgagcaaccugaugaggccguuaggccgaangguaaag

SEQ ID NO: 3480 - RNA, 38 nt, Artificial Sequence
  Description of Artificial Sequence:  Enzymatic Nucleic Acid
  misc_feature (31)..(31): n stands for inosine
cguugccgcugaugaggccguuaggccgaancaacggg

SEQ ID NO: 3481 - RNA, 38 nt, Artificial Sequence
  Description of Artificial Sequence:  Enzymatic Nucleic Acid
  misc_feature (31)..(31): n stands for inosine
caggccgucugaugaggccguuaggccgaanccgagca

SEQ ID NO: 3482 - RNA, 38 nt, Artificial Sequence
  Description of Artificial Sequence:  Enzymatic Nucleic Acid
  misc_feature (31)..(31): n stands for inosine
auagaccacugaugaggccguuaggccgaanccguugc

SEQ ID NO: 3483 - RNA, 38 nt, Artificial Sequence
  Description of Artificial Sequence:  Enzymatic Nucleic Acid
  misc_feature (31)..(31): n stands for inosine
cauagacccugaugaggccguuaggccgaangccguug

SEQ ID NO: 3484 - RNA, 38 nt, Artificial Sequence
  Description of Artificial Sequence:  Enzymatic Nucleic Acid
  misc_feature (31)..(31): n stands for inosine
cuuggcaucugaugaggccguuaggccgaanaccaggc

SEQ ID NO: 3485 - RNA, 38 nt, Artificial Sequence
  Description of Artificial Sequence:  Enzymatic Nucleic Acid
  misc_feature (31)..(31): n stands for inosine
aaacacuucugaugaggccguuaggccgaancauagac

SEQ ID NO: 3486 - RNA, 38 nt, Artificial Sequence
  Description of Artificial Sequence:  Enzymatic Nucleic Acid
  misc_feature (31)..(31): n stands for inosine
caaacacucugaugaggccguuaggccgaangcauaga

SEQ ID NO: 3487 - RNA, 38 nt, Artificial Sequence
  Description of Artificial Sequence:  Enzymatic Nucleic Acid
  misc_feature (31)..(31): n stands for inosine
guugcguccugaugaggccguuaggccgaancaaacac

SEQ ID NO: 3488 - RNA, 38 nt, Artificial Sequence
  Description of Artificial Sequence:  Enzymatic Nucleic Acid
  misc_feature (31)..(31): n stands for inosine
gugggggucugaugaggccguuaggccgaancgucagc

SEQ ID NO: 3489 - RNA, 38 nt, Artificial Sequence
  Description of Artificial Sequence:  Enzymatic Nucleic Acid
  misc_feature (31)..(31): n stands for inosine
ccagugggcugaugaggccguuaggccgaanuugcguc

SEQ ID NO: 3490 - RNA, 38 nt, Artificial Sequence
  Description of Artificial Sequence:  Enzymatic Nucleic Acid
  misc_feature (31)..(31): n stands for inosine
accaguggcugaugaggccguuaggccgaanguugcgu

SEQ ID NO: 3491 - RNA, 38 nt, Artificial Sequence
  Description of Artificial Sequence:  Enzymatic Nucleic Acid
  misc_feature (31)..(31): n stands for inosine
aaccagugcugaugaggccguuaggccgaangguugcg

SEQ ID NO: 3492 - RNA, 38 nt, Artificial Sequence
  Description of Artificial Sequence:  Enzymatic Nucleic Acid
  misc_feature (31)..(31): n stands for inosine
caaccagucugaugaggccguuaggccgaanggguugc

SEQ ID NO: 3493 - RNA, 38 nt, Artificial Sequence
  Description of Artificial Sequence:  Enzymatic Nucleic Acid
  misc_feature (31)..(31): n stands for inosine
ccaaccagcugaugaggccguuaggccgaangggguug

SEQ ID NO: 3494 - RNA, 38 nt, Artificial Sequence
  Description of Artificial Sequence:  Enzymatic Nucleic Acid
  misc_feature (31)..(31): n stands for inosine
ccccaacccugaugaggccguuaggccgaanugggggu

SEQ ID NO: 3495 - RNA, 38 nt, Artificial Sequence
  Description of Artificial Sequence:  Enzymatic Nucleic Acid
  misc_feature (31)..(31): n stands for inosine
uauggccacugaugaggccguuaggccgaanccccaac

SEQ ID NO: 3496 - RNA, 38 nt, Artificial Sequence
  Description of Artificial Sequence:  Enzymatic Nucleic Acid
  misc_feature (31)..(31): n stands for inosine
uggccuaucugaugaggccguuaggccgaanccaagcc

SEQ ID NO: 3497 - RNA, 38 nt, Artificial Sequence
  Description of Artificial Sequence:  Enzymatic Nucleic Acid
  misc_feature (31)..(31): n stands for inosine
auggccuacugaugaggccguuaggccgaangccaagc

SEQ ID NO: 3498 - RNA, 38 nt, Artificial Sequence
  Description of Artificial Sequence:  Enzymatic Nucleic Acid
  misc_feature (31)..(31): n stands for inosine
gcgcugaucugaugaggccguuaggccgaanccuaugg

SEQ ID NO: 3499 - RNA, 38 nt, Artificial Sequence
  Description of Artificial Sequence:  Enzymatic Nucleic Acid
  misc_feature (31)..(31): n stands for inosine
ugcgcugacugaugaggccguuaggccgaangccuaug

SEQ ID NO: 3500 - RNA, 38 nt, Artificial Sequence
  Description of Artificial Sequence:  Enzymatic Nucleic Acid
  misc_feature (31)..(31): n stands for inosine
gcaugcgccugaugaggccguuaggccgaanauggccu

SEQ ID NO: 3501 - RNA, 38 nt, Artificial Sequence
  Description of Artificial Sequence:  Enzymatic Nucleic Acid
  misc_feature (31)..(31): n stands for inosine
uccacgcacugaugaggccguuaggccgaancgcugau

SEQ ID NO: 3502 - RNA, 38 nt, Artificial Sequence
  Description of Artificial Sequence:  Enzymatic Nucleic Acid
  misc_feature (31)..(31): n stands for inosine
gacacaaacugaugaggccguuaggccgaanuuccacg

SEQ ID NO: 3503 - RNA, 38 nt, Artificial Sequence
  Description of Artificial Sequence:  Enzymatic Nucleic Acid
  misc_feature (31)..(31): n stands for inosine
agacacaacugaugaggccguuaggccgaanguuccac

SEQ ID NO: 3504 - RNA, 38 nt, Artificial Sequence
  Description of Artificial Sequence:  Enzymatic Nucleic Acid
  misc_feature (31)..(31): n stands for inosine
ggcagaggcugaugaggccguuaggccgaanacacaaa

SEQ ID NO: 3505 - RNA, 38 nt, Artificial Sequence
  Description of Artificial Sequence:  Enzymatic Nucleic Acid
  misc_feature (31)..(31): n stands for inosine
ucggcagacugaugaggccguuaggccgaanagacaca

SEQ ID NO: 3506 - RNA, 38 nt, Artificial Sequence
  Description of Artificial Sequence:  Enzymatic Nucleic Acid
  misc_feature (31)..(31): n stands for inosine
aucggcagcugaugaggccguuaggccgaangagacac

SEQ ID NO: 3507 - RNA, 38 nt, Artificial Sequence
  Description of Artificial Sequence:  Enzymatic Nucleic Acid
  misc_feature (31)..(31): n stands for inosine
ggaucggccugaugaggccguuaggccgaanaggagac

SEQ ID NO: 3508 - RNA, 38 nt, Artificial Sequence
  Description of Artificial Sequence:  Enzymatic Nucleic Acid
  misc_feature (31)..(31): n stands for inosine
uauggauccugaugaggccguuaggccgaancagagga

SEQ ID NO: 3509 - RNA, 38 nt, Artificial Sequence
  Description of Artificial Sequence:  Enzymatic Nucleic Acid
  misc_feature (31)..(31): n stands for inosine
cgcgguaucugaugaggccguuaggccgaanaucggca

SEQ ID NO: 3510 - RNA, 38 nt, Artificial Sequence
  Description of Artificial Sequence:  Enzymatic Nucleic Acid
  misc_feature (31)..(31): n stands for inosine
ccgcgguacugaugaggccguuaggccgaangaucggc

SEQ ID NO: 3511 - RNA, 38 nt, Artificial Sequence
  Description of Artificial Sequence:  Enzymatic Nucleic Acid
  misc_feature (31)..(31): n stands for inosine
aguuccgccugaugaggccguuaggccgaanuauggau

SEQ ID NO: 3512 - RNA, 38 nt, Artificial Sequence
  Description of Artificial Sequence:  Enzymatic Nucleic Acid
  misc_feature (31)..(31): n stands for inosine
cggcuaggcugaugaggccguuaggccgaanuuccgcg

SEQ ID NO: 3513 - RNA, 38 nt, Artificial Sequence
  Description of Artificial Sequence:  Enzymatic Nucleic Acid
  misc_feature (31)..(31): n stands for inosine
agcggcuacugaugaggccguuaggccgaanaguuccg

SEQ ID NO: 3514 - RNA, 38 nt, Artificial Sequence
  Description of Artificial Sequence:  Enzymatic Nucleic Acid
  misc_feature (31)..(31): n stands for inosine
aagcggcucugaugaggccguuaggccgaangaguucc

SEQ ID NO: 3515 - RNA, 38 nt, Artificial Sequence
  Description of Artificial Sequence:  Enzymatic Nucleic Acid
  misc_feature (31)..(31): n stands for inosine
aaacaagccugaugaggccguuaggccgaancuaggag

SEQ ID NO: 3516 - RNA, 38 nt, Artificial Sequence
  Description of Artificial Sequence:  Enzymatic Nucleic Acid
  misc_feature (31)..(31): n stands for inosine
gcaaaacacugaugaggccguuaggccgaancggcuag

SEQ ID NO: 3517 - RNA, 38 nt, Artificial Sequence
  Description of Artificial Sequence:  Enzymatic Nucleic Acid
  misc_feature (31)..(31): n stands for inosine
cugcugcgcugaugaggccguuaggccgaancaaaaca

SEQ ID NO: 3518 - RNA, 38 nt, Artificial Sequence
  Description of Artificial Sequence:  Enzymatic Nucleic Acid
  misc_feature (31)..(31): n stands for inosine
agaccugccugaugaggccguuaggccgaancgagcaa

SEQ ID NO: 3519 - RNA, 38 nt, Artificial Sequence
  Description of Artificial Sequence:  Enzymatic Nucleic Acid
  misc_feature (31)..(31): n stands for inosine
cccagacccugaugaggccguuaggccgaancugcgag

SEQ ID NO: 3520 - RNA, 38 nt, Artificial Sequence
  Description of Artificial Sequence:  Enzymatic Nucleic Acid
  misc_feature (31)..(31): n stands for inosine
uuugcccccugaugaggccguuaggccgaanaccugcu

SEQ ID NO: 3521 - RNA, 38 nt, Artificial Sequence
  Description of Artificial Sequence:  Enzymatic Nucleic Acid
  misc_feature (31)..(31): n stands for inosine
augaguuucugaugaggccguuaggccgaanccccaga

SEQ ID NO: 3522 - RNA, 38 nt, Artificial Sequence
  Description of Artificial Sequence:  Enzymatic Nucleic Acid
  misc_feature (31)..(31): n stands for inosine
ucccgaugcugaugaggccguuaggccgaanuuuugcc

SEQ ID NO: 3523 - RNA, 38 nt, Artificial Sequence
  Description of Artificial Sequence:  Enzymatic Nucleic Acid
  misc_feature (31)..(31): n stands for inosine
agucccgacugaugaggccguuaggccgaanaguuuug

SEQ ID NO: 3524 - RNA, 38 nt, Artificial Sequence
  Description of Artificial Sequence:  Enzymatic Nucleic Acid
  misc_feature (31)..(31): n stands for inosine
gaauuguccugaugaggccguuaggccgaanucccgau

SEQ ID NO: 3525 - RNA, 38 nt, Artificial Sequence
  Description of Artificial Sequence:  Enzymatic Nucleic Acid
  misc_feature (31)..(31): n stands for inosine
gacagaaucugaugaggccguuaggccgaanucagucc

SEQ ID NO: 3526 - RNA, 38 nt, Artificial Sequence
  Description of Artificial Sequence:  Enzymatic Nucleic Acid
  misc_feature (31)..(31): n stands for inosine
agcacgaccugaugaggccguuaggccgaanaauuguc

SEQ ID NO: 3527 - RNA, 38 nt, Artificial Sequence
  Description of Artificial Sequence:  Enzymatic Nucleic Acid
  misc_feature (31)..(31): n stands for inosine
ugcgggagcugaugaggccguuaggccgaancacgaca

SEQ ID NO: 3528 - RNA, 38 nt, Artificial Sequence
  Description of Artificial Sequence:  Enzymatic Nucleic Acid
  misc_feature (31)..(31): n stands for inosine
uuugcgggcugaugaggccguuaggccgaanagcacga

SEQ ID NO: 3529 - RNA, 38 nt, Artificial Sequence
  Description of Artificial Sequence:  Enzymatic Nucleic Acid
  misc_feature (31)..(31): n stands for inosine
uauuugcgcugaugaggccguuaggccgaanagagcac

SEQ ID NO: 3530 - RNA, 38 nt, Artificial Sequence
  Description of Artificial Sequence:  Enzymatic Nucleic Acid
  misc_feature (31)..(31): n stands for inosine
auauuugccugaugaggccguuaggccgaangagagca

SEQ ID NO: 3531 - RNA, 38 nt, Artificial Sequence
  Description of Artificial Sequence:  Enzymatic Nucleic Acid
  misc_feature (31)..(31): n stands for inosine
uguauauucugaugaggccguuaggccgaancgggaga

SEQ ID NO: 3532 - RNA, 38 nt, Artificial Sequence
  Description of Artificial Sequence:  Enzymatic Nucleic Acid
  misc_feature (31)..(31): n stands for inosine
ggaaaugacugaugaggccguuaggccgaanuauauuu

SEQ ID NO: 3533 - RNA, 38 nt, Artificial Sequence
  Description of Artificial Sequence:  Enzymatic Nucleic Acid
  misc_feature (31)..(31): n stands for inosine
cauggaaacugaugaggccguuaggccgaanauguaua

SEQ ID NO: 3534 - RNA, 38 nt, Artificial Sequence
  Description of Artificial Sequence:  Enzymatic Nucleic Acid
  misc_feature (31)..(31): n stands for inosine
gcagccaucugaugaggccguuaggccgaanaaaugau

SEQ ID NO: 3535 - RNA, 38 nt, Artificial Sequence
  Description of Artificial Sequence:  Enzymatic Nucleic Acid
  misc_feature (31)..(31): n stands for inosine
agcagccacugaugaggccguuaggccgaangaaauga

SEQ ID NO: 3536 - RNA, 38 nt, Artificial Sequence
  Description of Artificial Sequence:  Enzymatic Nucleic Acid
  misc_feature (31)..(31): n stands for inosine
agccuagccugaugaggccguuaggccgaanccaugga

SEQ ID NO: 3537 - RNA, 38 nt, Artificial Sequence
  Description of Artificial Sequence:  Enzymatic Nucleic Acid
  misc_feature (31)..(31): n stands for inosine
cacagccucugaugaggccguuaggccgaancagccau

SEQ ID NO: 3538 - RNA, 38 nt, Artificial Sequence
  Description of Artificial Sequence:  Enzymatic Nucleic Acid
  misc_feature (31)..(31): n stands for inosine
ggcagcaccugaugaggccguuaggccgaanccuagca

SEQ ID NO: 3539 - RNA, 38 nt, Artificial Sequence
  Description of Artificial Sequence:  Enzymatic Nucleic Acid
  misc_feature (31)..(31): n stands for inosine
caguuggccugaugaggccguuaggccgaancacagcc

SEQ ID NO: 3540 - RNA, 38 nt, Artificial Sequence
  Description of Artificial Sequence:  Enzymatic Nucleic Acid
  misc_feature (31)..(31): n stands for inosine
auccaguucugaugaggccguuaggccgaancagcaca

SEQ ID NO: 3541 - RNA, 38 nt, Artificial Sequence
  Description of Artificial Sequence:  Enzymatic Nucleic Acid
  misc_feature (31)..(31): n stands for inosine
gauccagucugaugaggccguuaggccgaangcagcac

SEQ ID NO: 3542 - RNA, 38 nt, Artificial Sequence
  Description of Artificial Sequence:  Enzymatic Nucleic Acid
  misc_feature (31)..(31): n stands for inosine
uaggaucccugaugaggccguuaggccgaanuuggcag

SEQ ID NO: 3543 - RNA, 38 nt, Artificial Sequence
  Description of Artificial Sequence:  Enzymatic Nucleic Acid
  misc_feature (31)..(31): n stands for inosine
cccgcguacugaugaggccguuaggccgaanauccagu

SEQ ID NO: 3544 - RNA, 38 nt, Artificial Sequence
  Description of Artificial Sequence:  Enzymatic Nucleic Acid
  misc_feature (31)..(31): n stands for inosine
ucccgcgucugaugaggccguuaggccgaangauccag

SEQ ID NO: 3545 - RNA, 38 nt, Artificial Sequence
  Description of Artificial Sequence:  Enzymatic Nucleic Acid
  misc_feature (31)..(31): n stands for inosine
uaaacaaacugaugaggccguuaggccgaanacguccc

SEQ ID NO: 3546 - RNA, 38 nt, Artificial Sequence
  Description of Artificial Sequence:  Enzymatic Nucleic Acid
  misc_feature (31)..(31): n stands for inosine
guaaacaacugaugaggccguuaggccgaangacgucc

SEQ ID NO: 3547 - RNA, 38 nt, Artificial Sequence
  Description of Artificial Sequence:  Enzymatic Nucleic Acid
  misc_feature (31)..(31): n stands for inosine
cgccgacgcugaugaggccguuaggccgaanacguaaa

SEQ ID NO: 3548 - RNA, 38 nt, Artificial Sequence
  Description of Artificial Sequence:  Enzymatic Nucleic Acid
  misc_feature (31)..(31): n stands for inosine
gcgccgaccugaugaggccguuaggccgaangacguaa

SEQ ID NO: 3549 - RNA, 38 nt, Artificial Sequence
  Description of Artificial Sequence:  Enzymatic Nucleic Acid
  misc_feature (31)..(31): n stands for inosine
cgggauuccugaugaggccguuaggccgaancgccgac

SEQ ID NO: 3550 - RNA, 38 nt, Artificial Sequence
  Description of Artificial Sequence:  Enzymatic Nucleic Acid
  misc_feature (31)..(31): n stands for inosine
cguccgcgcugaugaggccguuaggccgaanauucagc

SEQ ID NO: 3551 - RNA, 38 nt, Artificial Sequence
  Description of Artificial Sequence:  Enzymatic Nucleic Acid
  misc_feature (31)..(31): n stands for inosine
ucguccgccugaugaggccguuaggccgaangauucag

SEQ ID NO: 3552 - RNA, 38 nt, Artificial Sequence
  Description of Artificial Sequence:  Enzymatic Nucleic Acid
  misc_feature (31)..(31): n stands for inosine
ccgggaggcugaugaggccguuaggccgaanucguccg

SEQ ID NO: 3553 - RNA, 38 nt, Artificial Sequence
  Description of Artificial Sequence:  Enzymatic Nucleic Acid
  misc_feature (31)..(31): n stands for inosine
cccgggagcugaugaggccguuaggccgaangucgucc

SEQ ID NO: 3554 - RNA, 38 nt, Artificial Sequence
  Description of Artificial Sequence:  Enzymatic Nucleic Acid
  misc_feature (31)..(31): n stands for inosine
ccccgggacugaugaggccguuaggccgaanggucguc

SEQ ID NO: 3555 - RNA, 38 nt, Artificial Sequence
  Description of Artificial Sequence:  Enzymatic Nucleic Acid
  misc_feature (31)..(31): n stands for inosine
gccccgggcugaugaggccguuaggccgaangggucgu

SEQ ID NO: 3556 - RNA, 38 nt, Artificial Sequence
  Description of Artificial Sequence:  Enzymatic Nucleic Acid
  misc_feature (31)..(31): n stands for inosine
cggccccgcugaugaggccguuaggccgaanagggguc

SEQ ID NO: 3557 - RNA, 38 nt, Artificial Sequence
  Description of Artificial Sequence:  Enzymatic Nucleic Acid
  misc_feature (31)..(31): n stands for inosine
gcggcccccugaugaggccguuaggccgaangaggggu

SEQ ID NO: 3558 - RNA, 38 nt, Artificial Sequence
  Description of Artificial Sequence:  Enzymatic Nucleic Acid
  misc_feature (31)..(31): n stands for inosine
ccccaagccugaugaggccguuaggccgaanccccggg

SEQ ID NO: 3559 - RNA, 38 nt, Artificial Sequence
  Description of Artificial Sequence:  Enzymatic Nucleic Acid
  misc_feature (31)..(31): n stands for inosine
gagccccacugaugaggccguuaggccgaancggcccc

SEQ ID NO: 3560 - RNA, 38 nt, Artificial Sequence
  Description of Artificial Sequence:  Enzymatic Nucleic Acid
  misc_feature (31)..(31): n stands for inosine
ggcgguagcugaugaggccguuaggccgaanccccaag

SEQ ID NO: 3561 - RNA, 38 nt, Artificial Sequence
  Description of Artificial Sequence:  Enzymatic Nucleic Acid
  misc_feature (31)..(31): n stands for inosine
cgggcggucugaugaggccguuaggccgaanagcccca

SEQ ID NO: 3562 - RNA, 38 nt, Artificial Sequence
  Description of Artificial Sequence:  Enzymatic Nucleic Acid
  misc_feature (31)..(31): n stands for inosine
aagcgggccugaugaggccguuaggccgaanuagagcc

SEQ ID NO: 3563 - RNA, 38 nt, Artificial Sequence
  Description of Artificial Sequence:  Enzymatic Nucleic Acid
  misc_feature (31)..(31): n stands for inosine
gagaagcgcugaugaggccguuaggccgaancgguaga

SEQ ID NO: 3564 - RNA, 38 nt, Artificial Sequence
  Description of Artificial Sequence:  Enzymatic Nucleic Acid
  misc_feature (31)..(31): n stands for inosine
ggagaagccugaugaggccguuaggccgaangcgguag

SEQ ID NO: 3565 - RNA, 38 nt, Artificial Sequence
  Description of Artificial Sequence:  Enzymatic Nucleic Acid
  misc_feature (31)..(31): n stands for inosine
ggcggagacugaugaggccguuaggccgaancgggcgg

SEQ ID NO: 3566 - RNA, 38 nt, Artificial Sequence
  Description of Artificial Sequence:  Enzymatic Nucleic Acid
  misc_feature (31)..(31): n stands for inosine
auaggcggcugaugaggccguuaggccgaanaagcggg

SEQ ID NO: 3567 - RNA, 38 nt, Artificial Sequence
  Description of Artificial Sequence:  Enzymatic Nucleic Acid
  misc_feature (31)..(31): n stands for inosine
caauaggccugaugaggccguuaggccgaanagaagcg

SEQ ID NO: 3568 - RNA, 38 nt, Artificial Sequence
  Description of Artificial Sequence:  Enzymatic Nucleic Acid
  misc_feature (31)..(31): n stands for inosine
guacaauacugaugaggccguuaggccgaancggagaa

SEQ ID NO: 3569 - RNA, 38 nt, Artificial Sequence
  Description of Artificial Sequence:  Enzymatic Nucleic Acid
  misc_feature (31)..(31): n stands for inosine
gguacaaucugaugaggccguuaggccgaangcggaga

SEQ ID NO: 3570 - RNA, 38 nt, Artificial Sequence
  Description of Artificial Sequence:  Enzymatic Nucleic Acid
  misc_feature (31)..(31): n stands for inosine
ggacgguccugaugaggccguuaggccgaanuacaaua

SEQ ID NO: 3571 - RNA, 38 nt, Artificial Sequence
  Description of Artificial Sequence:  Enzymatic Nucleic Acid
  misc_feature (31)..(31): n stands for inosine
ccguggaccugaugaggccguuaggccgaanucgguac

SEQ ID NO: 3572 - RNA, 38 nt, Artificial Sequence
  Description of Artificial Sequence:  Enzymatic Nucleic Acid
  misc_feature (31)..(31): n stands for inosine
cgccccgucugaugaggccguuaggccgaanacggucg

SEQ ID NO: 3573 - RNA, 38 nt, Artificial Sequence
  Description of Artificial Sequence:  Enzymatic Nucleic Acid
  misc_feature (31)..(31): n stands for inosine
gcgccccgcugaugaggccguuaggccgaangacgguc

SEQ ID NO: 3574 - RNA, 38 nt, Artificial Sequence
  Description of Artificial Sequence:  Enzymatic Nucleic Acid
  misc_feature (31)..(31): n stands for inosine
aagagaggcugaugaggccguuaggccgaancgccccg

SEQ ID NO: 3575 - RNA, 38 nt, Artificial Sequence
  Description of Artificial Sequence:  Enzymatic Nucleic Acid
  misc_feature (31)..(31): n stands for inosine
uaaagagacugaugaggccguuaggccgaanugcgccc

SEQ ID NO: 3576 - RNA, 38 nt, Artificial Sequence
  Description of Artificial Sequence:  Enzymatic Nucleic Acid
  misc_feature (31)..(31): n stands for inosine
guaaagagcugaugaggccguuaggccgaangugcgcc

SEQ ID NO: 3577 - RNA, 38 nt, Artificial Sequence
  Description of Artificial Sequence:  Enzymatic Nucleic Acid
  misc_feature (31)..(31): n stands for inosine
gcguaaagcugaugaggccguuaggccgaanaggugcg

SEQ ID NO: 3578 - RNA, 38 nt, Artificial Sequence
  Description of Artificial Sequence:  Enzymatic Nucleic Acid
  misc_feature (31)..(31): n stands for inosine
ccgcguaacugaugaggccguuaggccgaanagaggug

SEQ ID NO: 3579 - RNA, 38 nt, Artificial Sequence
  Description of Artificial Sequence:  Enzymatic Nucleic Acid
  misc_feature (31)..(31): n stands for inosine
agacggggcugaugaggccguuaggccgaanuccgcgu

SEQ ID NO: 3580 - RNA, 38 nt, Artificial Sequence
  Description of Artificial Sequence:  Enzymatic Nucleic Acid
  misc_feature (31)..(31): n stands for inosine
acagacggcugaugaggccguuaggccgaanaguccgc

SEQ ID NO: 3581 - RNA, 38 nt, Artificial Sequence
  Description of Artificial Sequence:  Enzymatic Nucleic Acid
  misc_feature (31)..(31): n stands for inosine
cacagacgcugaugaggccguuaggccgaangaguccg

SEQ ID NO: 3582 - RNA, 38 nt, Artificial Sequence
  Description of Artificial Sequence:  Enzymatic Nucleic Acid
  misc_feature (31)..(31): n stands for inosine
gcacagaccugaugaggccguuaggccgaanggagucc

SEQ ID NO: 3583 - RNA, 38 nt, Artificial Sequence
  Description of Artificial Sequence:  Enzymatic Nucleic Acid
  misc_feature (31)..(31): n stands for inosine
gaaggcaccugaugaggccguuaggccgaanacgggga

SEQ ID NO: 3584 - RNA, 38 nt, Artificial Sequence
  Description of Artificial Sequence:  Enzymatic Nucleic Acid
  misc_feature (31)..(31): n stands for inosine
gaugagaacugaugaggccguuaggccgaancacagac

SEQ ID NO: 3585 - RNA, 38 nt, Artificial Sequence
  Description of Artificial Sequence:  Enzymatic Nucleic Acid
  misc_feature (31)..(31): n stands for inosine
agaugagacugaugaggccguuaggccgaangcacaga

SEQ ID NO: 3586 - RNA, 38 nt, Artificial Sequence
  Description of Artificial Sequence:  Enzymatic Nucleic Acid
  misc_feature (31)..(31): n stands for inosine
ggcagaugcugaugaggccguuaggccgaanaaggcac

SEQ ID NO: 3587 - RNA, 38 nt, Artificial Sequence
  Description of Artificial Sequence:  Enzymatic Nucleic Acid
  misc_feature (31)..(31): n stands for inosine
ccggcagacugaugaggccguuaggccgaanagaaggc

SEQ ID NO: 3588 - RNA, 38 nt, Artificial Sequence
  Description of Artificial Sequence:  Enzymatic Nucleic Acid
  misc_feature (31)..(31): n stands for inosine
gguccggccugaugaggccguuaggccgaanaugagaa

SEQ ID NO: 3589 - RNA, 38 nt, Artificial Sequence
  Description of Artificial Sequence:  Enzymatic Nucleic Acid
  misc_feature (31)..(31): n stands for inosine
cacggucccugaugaggccguuaggccgaancagauga

SEQ ID NO: 3590 - RNA, 38 nt, Artificial Sequence
  Description of Artificial Sequence:  Enzymatic Nucleic Acid
  misc_feature (31)..(31): n stands for inosine
gugcacaccugaugaggccguuaggccgaanuccggca

SEQ ID NO: 3591 - RNA, 38 nt, Artificial Sequence
  Description of Artificial Sequence:  Enzymatic Nucleic Acid
  misc_feature (31)..(31): n stands for inosine
aagcgaagcugaugaggccguuaggccgaancacacgg

SEQ ID NO: 3592 - RNA, 38 nt, Artificial Sequence
  Description of Artificial Sequence:  Enzymatic Nucleic Acid
  misc_feature (31)..(31): n stands for inosine
ugaagcgacugaugaggccguuaggccgaanugcacac

SEQ ID NO: 3593 - RNA, 38 nt, Artificial Sequence
  Description of Artificial Sequence:  Enzymatic Nucleic Acid
  misc_feature (31)..(31): n stands for inosine
agaggugacugaugaggccguuaggccgaancgaagug

SEQ ID NO: 3594 - RNA, 38 nt, Artificial Sequence
  Description of Artificial Sequence:  Enzymatic Nucleic Acid
  misc_feature (31)..(31): n stands for inosine
ugcagaggcugaugaggccguuaggccgaanaagcgaa

SEQ ID NO: 3595 - RNA, 38 nt, Artificial Sequence
  Description of Artificial Sequence:  Enzymatic Nucleic Acid
  misc_feature (31)..(31): n stands for inosine
cgugcagacugaugaggccguuaggccgaanugaagcg

SEQ ID NO: 3596 - RNA, 38 nt, Artificial Sequence
  Description of Artificial Sequence:  Enzymatic Nucleic Acid
  misc_feature (31)..(31): n stands for inosine
acgugcagcugaugaggccguuaggccgaangugaagc

SEQ ID NO: 3597 - RNA, 38 nt, Artificial Sequence
  Description of Artificial Sequence:  Enzymatic Nucleic Acid
  misc_feature (31)..(31): n stands for inosine
cgacgugccugaugaggccguuaggccgaanaggugaa

SEQ ID NO: 3598 - RNA, 38 nt, Artificial Sequence
  Description of Artificial Sequence:  Enzymatic Nucleic Acid
  misc_feature (31)..(31): n stands for inosine
augcgacgcugaugaggccguuaggccgaancagaggu

SEQ ID NO: 3599 - RNA, 38 nt, Artificial Sequence
  Description of Artificial Sequence:  Enzymatic Nucleic Acid
  misc_feature (31)..(31): n stands for inosine
ggucuccacugaugaggccguuaggccgaancgacgug

SEQ ID NO: 3600 - RNA, 38 nt, Artificial Sequence
  Description of Artificial Sequence:  Enzymatic Nucleic Acid
  misc_feature (31)..(31): n stands for inosine
uucacggucugaugaggccguuaggccgaanucuccau

SEQ ID NO: 3601 - RNA, 38 nt, Artificial Sequence
  Description of Artificial Sequence:  Enzymatic Nucleic Acid
  misc_feature (31)..(31): n stands for inosine
guucacggcugaugaggccguuaggccgaangucucca

SEQ ID NO: 3602 - RNA, 38 nt, Artificial Sequence
  Description of Artificial Sequence:  Enzymatic Nucleic Acid
  misc_feature (31)..(31): n stands for inosine
gcguucaccugaugaggccguuaggccgaanuggucuc

SEQ ID NO: 3603 - RNA, 38 nt, Artificial Sequence
  Description of Artificial Sequence:  Enzymatic Nucleic Acid
  misc_feature (31)..(31): n stands for inosine
uuccugugcugaugaggccguuaggccgaancguucac

SEQ ID NO: 3604 - RNA, 38 nt, Artificial Sequence
  Description of Artificial Sequence:  Enzymatic Nucleic Acid
  misc_feature (31)..(31): n stands for inosine
guuccugucugaugaggccguuaggccgaangcguuca

SEQ ID NO: 3605 - RNA, 38 nt, Artificial Sequence
  Description of Artificial Sequence:  Enzymatic Nucleic Acid
  misc_feature (31)..(31): n stands for inosine
gguuccugcugaugaggccguuaggccgaanggcguuc

SEQ ID NO: 3606 - RNA, 38 nt, Artificial Sequence
  Description of Artificial Sequence:  Enzymatic Nucleic Acid
  misc_feature (31)..(31): n stands for inosine
cagguucccugaugaggccguuaggccgaanugggcgu

SEQ ID NO: 3607 - RNA, 38 nt, Artificial Sequence
  Description of Artificial Sequence:  Enzymatic Nucleic Acid
  misc_feature (31)..(31): n stands for inosine
cuugggcacugaugaggccguuaggccgaanuuccugu

SEQ ID NO: 3608 - RNA, 38 nt, Artificial Sequence
  Description of Artificial Sequence:  Enzymatic Nucleic Acid
  misc_feature (31)..(31): n stands for inosine
ccuugggccugaugaggccguuaggccgaanguuccug

SEQ ID NO: 3609 - RNA, 38 nt, Artificial Sequence
  Description of Artificial Sequence:  Enzymatic Nucleic Acid
  misc_feature (31)..(31): n stands for inosine
agaccuugcugaugaggccguuaggccgaancagguuc

SEQ ID NO: 3610 - RNA, 38 nt, Artificial Sequence
  Description of Artificial Sequence:  Enzymatic Nucleic Acid
  misc_feature (31)..(31): n stands for inosine
aagaccuucugaugaggccguuaggccgaangcagguu

SEQ ID NO: 3611 - RNA, 38 nt, Artificial Sequence
  Description of Artificial Sequence:  Enzymatic Nucleic Acid
  misc_feature (31)..(31): n stands for inosine
caagaccucugaugaggccguuaggccgaanggcaggu

SEQ ID NO: 3612 - RNA, 38 nt, Artificial Sequence
  Description of Artificial Sequence:  Enzymatic Nucleic Acid
  misc_feature (31)..(31): n stands for inosine
cuuaugcacugaugaggccguuaggccgaanaccuugg

SEQ ID NO: 3613 - RNA, 38 nt, Artificial Sequence
  Description of Artificial Sequence:  Enzymatic Nucleic Acid
  misc_feature (31)..(31): n stands for inosine
uccucuuacugaugaggccguuaggccgaancaagacc

SEQ ID NO: 3614 - RNA, 38 nt, Artificial Sequence
  Description of Artificial Sequence:  Enzymatic Nucleic Acid
  misc_feature (31)..(31): n stands for inosine
aguccaagcugaugaggccguuaggccgaanuccucuu

SEQ ID NO: 3615 - RNA, 38 nt, Artificial Sequence
  Description of Artificial Sequence:  Enzymatic Nucleic Acid
  misc_feature (31)..(31): n stands for inosine
aaaguccacugaugaggccguuaggccgaanaguccuc

SEQ ID NO: 3616 - RNA, 38 nt, Artificial Sequence
  Description of Artificial Sequence:  Enzymatic Nucleic Acid
  misc_feature (31)..(31): n stands for inosine
uugcugaacugaugaggccguuaggccgaanuccaaga

SEQ ID NO: 3617 - RNA, 38 nt, Artificial Sequence
  Description of Artificial Sequence:  Enzymatic Nucleic Acid
  misc_feature (31)..(31): n stands for inosine
gacauugccugaugaggccguuaggccgaanaaagucc

SEQ ID NO: 3618 - RNA, 38 nt, Artificial Sequence
  Description of Artificial Sequence:  Enzymatic Nucleic Acid
  misc_feature (31)..(31): n stands for inosine
guugacaucugaugaggccguuaggccgaancugaaag

SEQ ID NO: 3619 - RNA, 38 nt, Artificial Sequence
  Description of Artificial Sequence:  Enzymatic Nucleic Acid
  misc_feature (31)..(31): n stands for inosine
ucggucgucugaugaggccguuaggccgaanacauugc

SEQ ID NO: 3620 - RNA, 38 nt, Artificial Sequence
  Description of Artificial Sequence:  Enzymatic Nucleic Acid
  misc_feature (31)..(31): n stands for inosine
ucaagguccugaugaggccguuaggccgaanucguuga

SEQ ID NO: 3621 - RNA, 38 nt, Artificial Sequence
  Description of Artificial Sequence:  Enzymatic Nucleic Acid
  misc_feature (31)..(31): n stands for inosine
ugccucaacugaugaggccguuaggccgaanucggucg

SEQ ID NO: 3622 - RNA, 38 nt, Artificial Sequence
  Description of Artificial Sequence:  Enzymatic Nucleic Acid
  misc_feature (31)..(31): n stands for inosine
augccucacugaugaggccguuaggccgaangucgguc

SEQ ID NO: 3623 - RNA, 38 nt, Artificial Sequence
  Description of Artificial Sequence:  Enzymatic Nucleic Acid
  misc_feature (31)..(31): n stands for inosine
uugaaguacugaugaggccguuaggccgaanccucaag

SEQ ID NO: 3624 - RNA, 38 nt, Artificial Sequence
  Description of Artificial Sequence:  Enzymatic Nucleic Acid
  misc_feature (31)..(31): n stands for inosine
gucuuugacugaugaggccguuaggccgaanuaugccu

SEQ ID NO: 3625 - RNA, 38 nt, Artificial Sequence
  Description of Artificial Sequence:  Enzymatic Nucleic Acid
  misc_feature (31)..(31): n stands for inosine
acagucuucugaugaggccguuaggccgaanaaguaug

SEQ ID NO: 3626 - RNA, 38 nt, Artificial Sequence
  Description of Artificial Sequence:  Enzymatic Nucleic Acid
  misc_feature (31)..(31): n stands for inosine
aaacacaccugaugaggccguuaggccgaanucuuuga

SEQ ID NO: 3627 - RNA, 38 nt, Artificial Sequence
  Description of Artificial Sequence:  Enzymatic Nucleic Acid
  misc_feature (31)..(31): n stands for inosine
uaguacaacugaugaggccguuaggccgaanaccuuua

SEQ ID NO: 3628 - RNA, 38 nt, Artificial Sequence
  Description of Artificial Sequence:  Enzymatic Nucleic Acid
  misc_feature (31)..(31): n stands for inosine
agccuccucugaugaggccguuaggccgaanuacaaag

SEQ ID NO: 3629 - RNA, 38 nt, Artificial Sequence
  Description of Artificial Sequence:  Enzymatic Nucleic Acid
  misc_feature (31)..(31): n stands for inosine
augccuaccugaugaggccguuaggccgaanccuccua

SEQ ID NO: 3630 - RNA, 38 nt, Artificial Sequence
  Description of Artificial Sequence:  Enzymatic Nucleic Acid
  misc_feature (31)..(31): n stands for inosine
ccaauuuacugaugaggccguuaggccgaanccuacag

SEQ ID NO: 3631 - RNA, 38 nt, Artificial Sequence
  Description of Artificial Sequence:  Enzymatic Nucleic Acid
  misc_feature (31)..(31): n stands for inosine
ggugcuggcugaugaggccguuaggccgaanaacacac

SEQ ID NO: 3632 - RNA, 38 nt, Artificial Sequence
  Description of Artificial Sequence:  Enzymatic Nucleic Acid
  misc_feature (31)..(31): n stands for inosine
auggugcucugaugaggccguuaggccgaanugaacac

SEQ ID NO: 3633 - RNA, 38 nt, Artificial Sequence
  Description of Artificial Sequence:  Enzymatic Nucleic Acid
  misc_feature (31)..(31): n stands for inosine
cauggugccugaugaggccguuaggccgaangugaaca

SEQ ID NO: 3634 - RNA, 38 nt, Artificial Sequence
  Description of Artificial Sequence:  Enzymatic Nucleic Acid
  misc_feature (31)..(31): n stands for inosine
uugcauggcugaugaggccguuaggccgaancugguga

SEQ ID NO: 3635 - RNA, 38 nt, Artificial Sequence
  Description of Artificial Sequence:  Enzymatic Nucleic Acid
  misc_feature (31)..(31): n stands for inosine
aguugcaucugaugaggccguuaggccgaanugcuggu

SEQ ID NO: 3636 - RNA, 38 nt, Artificial Sequence
  Description of Artificial Sequence:  Enzymatic Nucleic Acid
  misc_feature (31)..(31): n stands for inosine
aaguugcacugaugaggccguuaggccgaangugcugg

SEQ ID NO: 3637 - RNA, 38 nt, Artificial Sequence
  Description of Artificial Sequence:  Enzymatic Nucleic Acid
  misc_feature (31)..(31): n stands for inosine
gaaaaagucugaugaggccguuaggccgaancauggug

SEQ ID NO: 3638 - RNA, 38 nt, Artificial Sequence
  Description of Artificial Sequence:  Enzymatic Nucleic Acid
  misc_feature (31)..(31): n stands for inosine
ggugaaaacugaugaggccguuaggccgaanuugcaug

SEQ ID NO: 3639 - RNA, 38 nt, Artificial Sequence
  Description of Artificial Sequence:  Enzymatic Nucleic Acid
  misc_feature (31)..(31): n stands for inosine
ggcagaggcugaugaggccguuaggccgaanaaaaagu

SEQ ID NO: 3640 - RNA, 38 nt, Artificial Sequence
  Description of Artificial Sequence:  Enzymatic Nucleic Acid
  misc_feature (31)..(31): n stands for inosine
uaggcagacugaugaggccguuaggccgaanugaaaaa

SEQ ID NO: 3641 - RNA, 38 nt, Artificial Sequence
  Description of Artificial Sequence:  Enzymatic Nucleic Acid
  misc_feature (31)..(31): n stands for inosine
uuaggcagcugaugaggccguuaggccgaangugaaaa

SEQ ID NO: 3642 - RNA, 38 nt, Artificial Sequence
  Description of Artificial Sequence:  Enzymatic Nucleic Acid
  misc_feature (31)..(31): n stands for inosine
gauuaggccugaugaggccguuaggccgaanaggugaa

SEQ ID NO: 3643 - RNA, 38 nt, Artificial Sequence
  Description of Artificial Sequence:  Enzymatic Nucleic Acid
  misc_feature (31)..(31): n stands for inosine
gaugauuacugaugaggccguuaggccgaancagaggu

SEQ ID NO: 3644 - RNA, 38 nt, Artificial Sequence
  Description of Artificial Sequence:  Enzymatic Nucleic Acid
  misc_feature (31)..(31): n stands for inosine
agaugauucugaugaggccguuaggccgaangcagagg

SEQ ID NO: 3645 - RNA, 38 nt, Artificial Sequence
  Description of Artificial Sequence:  Enzymatic Nucleic Acid
  misc_feature (31)..(31): n stands for inosine
acaugagacugaugaggccguuaggccgaanauuaggc

SEQ ID NO: 3646 - RNA, 38 nt, Artificial Sequence
  Description of Artificial Sequence:  Enzymatic Nucleic Acid
  misc_feature (31)..(31): n stands for inosine
ugaacaugcugaugaggccguuaggccgaanaugauua

SEQ ID NO: 3647 - RNA, 38 nt, Artificial Sequence
  Description of Artificial Sequence:  Enzymatic Nucleic Acid
  misc_feature (31)..(31): n stands for inosine
caugaacacugaugaggccguuaggccgaanagaugau

SEQ ID NO: 3648 - RNA, 38 nt, Artificial Sequence
  Description of Artificial Sequence:  Enzymatic Nucleic Acid
  misc_feature (31)..(31): n stands for inosine
guaggacacugaugaggccguuaggccgaanaacauga

SEQ ID NO: 3649 - RNA, 38 nt, Artificial Sequence
  Description of Artificial Sequence:  Enzymatic Nucleic Acid
  misc_feature (31)..(31): n stands for inosine
gaacaguacugaugaggccguuaggccgaanacaugaa

SEQ ID NO: 3650 - RNA, 38 nt, Artificial Sequence
  Description of Artificial Sequence:  Enzymatic Nucleic Acid
  misc_feature (31)..(31): n stands for inosine
ugaacagucugaugaggccguuaggccgaangacauga

SEQ ID NO: 3651 - RNA, 38 nt, Artificial Sequence
  Description of Artificial Sequence:  Enzymatic Nucleic Acid
  misc_feature (31)..(31): n stands for inosine
gcuugaaccugaugaggccguuaggccgaanuaggaca

SEQ ID NO: 3652 - RNA, 38 nt, Artificial Sequence
  Description of Artificial Sequence:  Enzymatic Nucleic Acid
  misc_feature (31)..(31): n stands for inosine
uggaggcucugaugaggccguuaggccgaanaacagua

SEQ ID NO: 3653 - RNA, 38 nt, Artificial Sequence
  Description of Artificial Sequence:  Enzymatic Nucleic Acid
  misc_feature (31)..(31): n stands for inosine
agcuuggacugaugaggccguuaggccgaancuugaac

SEQ ID NO: 3654 - RNA, 38 nt, Artificial Sequence
  Description of Artificial Sequence:  Enzymatic Nucleic Acid
  misc_feature (31)..(31): n stands for inosine
cagcuuggcugaugaggccguuaggccgaangcuugaa

SEQ ID NO: 3655 - RNA, 38 nt, Artificial Sequence
  Description of Artificial Sequence:  Enzymatic Nucleic Acid
  misc_feature (31)..(31): n stands for inosine
cacagcuucugaugaggccguuaggccgaanaggcuug

SEQ ID NO: 3656 - RNA, 38 nt, Artificial Sequence
  Description of Artificial Sequence:  Enzymatic Nucleic Acid
  misc_feature (31)..(31): n stands for inosine
gcacagcucugaugaggccguuaggccgaangaggcuu

SEQ ID NO: 3657 - RNA, 38 nt, Artificial Sequence
  Description of Artificial Sequence:  Enzymatic Nucleic Acid
  misc_feature (31)..(31): n stands for inosine
caaggcaccugaugaggccguuaggccgaancuuggag

SEQ ID NO: 3658 - RNA, 38 nt, Artificial Sequence
  Description of Artificial Sequence:  Enzymatic Nucleic Acid
  misc_feature (31)..(31): n stands for inosine
ccacccaacugaugaggccguuaggccgaancacagcu

SEQ ID NO: 3659 - RNA, 38 nt, Artificial Sequence
  Description of Artificial Sequence:  Enzymatic Nucleic Acid
  misc_feature (31)..(31): n stands for inosine
gccacccacugaugaggccguuaggccgaangcacagc

SEQ ID NO: 3660 - RNA, 38 nt, Artificial Sequence
  Description of Artificial Sequence:  Enzymatic Nucleic Acid
  misc_feature (31)..(31): n stands for inosine
ugccccaacugaugaggccguuaggccgaanccaccca

SEQ ID NO: 3661 - RNA, 38 nt, Artificial Sequence
  Description of Artificial Sequence:  Enzymatic Nucleic Acid
  misc_feature (31)..(31): n stands for inosine
aauguccacugaugaggccguuaggccgaanccccaaa

SEQ ID NO: 3662 - RNA, 38 nt, Artificial Sequence
  Description of Artificial Sequence:  Enzymatic Nucleic Acid
  misc_feature (31)..(31): n stands for inosine
cgggucaacugaugaggccguuaggccgaanuccaugc

SEQ ID NO: 3663 - RNA, 38 nt, Artificial Sequence
  Description of Artificial Sequence:  Enzymatic Nucleic Acid
  misc_feature (31)..(31): n stands for inosine
uuuauacgcugaugaggccguuaggccgaanucaaugu

SEQ ID NO: 3664 - RNA, 38 nt, Artificial Sequence
  Description of Artificial Sequence:  Enzymatic Nucleic Acid
  misc_feature (31)..(31): n stands for inosine
cuuuauaccugaugaggccguuaggccgaangucaaug

SEQ ID NO: 3665 - RNA, 38 nt, Artificial Sequence
  Description of Artificial Sequence:  Enzymatic Nucleic Acid
  misc_feature (31)..(31): n stands for inosine
uccacagacugaugaggccguuaggccgaancuccaaa

SEQ ID NO: 3666 - RNA, 38 nt, Artificial Sequence
  Description of Artificial Sequence:  Enzymatic Nucleic Acid
  misc_feature (31)..(31): n stands for inosine
aacuccaccugaugaggccguuaggccgaanaagcucc

SEQ ID NO: 3667 - RNA, 38 nt, Artificial Sequence
  Description of Artificial Sequence:  Enzymatic Nucleic Acid
  misc_feature (31)..(31): n stands for inosine
aaaaagagcugaugaggccguuaggccgaanuaacucc

SEQ ID NO: 3668 - RNA, 38 nt, Artificial Sequence
  Description of Artificial Sequence:  Enzymatic Nucleic Acid
  misc_feature (31)..(31): n stands for inosine
caaaaaagcugaugaggccguuaggccgaanaguaacu

SEQ ID NO: 3669 - RNA, 38 nt, Artificial Sequence
  Description of Artificial Sequence:  Enzymatic Nucleic Acid
  misc_feature (31)..(31): n stands for inosine
ggcaaaaacugaugaggccguuaggccgaanagaguaa

SEQ ID NO: 3670 - RNA, 38 nt, Artificial Sequence
  Description of Artificial Sequence:  Enzymatic Nucleic Acid
  misc_feature (31)..(31): n stands for inosine
agucagaacugaugaggccguuaggccgaancaaaaaa

SEQ ID NO: 3671 - RNA, 38 nt, Artificial Sequence
  Description of Artificial Sequence:  Enzymatic Nucleic Acid
  misc_feature (31)..(31): n stands for inosine
aagucagacugaugaggccguuaggccgaangcaaaaa

SEQ ID NO: 3672 - RNA, 38 nt, Artificial Sequence
  Description of Artificial Sequence:  Enzymatic Nucleic Acid
  misc_feature (31)..(31): n stands for inosine
aagaaguccugaugaggccguuaggccgaanaaggcaa

SEQ ID NO: 3673 - RNA, 38 nt, Artificial Sequence
  Description of Artificial Sequence:  Enzymatic Nucleic Acid
  misc_feature (31)..(31): n stands for inosine
aggaaagacugaugaggccguuaggccgaanucagaag

SEQ ID NO: 3674 - RNA, 38 nt, Artificial Sequence
  Description of Artificial Sequence:  Enzymatic Nucleic Acid
  misc_feature (31)..(31): n stands for inosine
agaaggaacugaugaggccguuaggccgaanaagucag

SEQ ID NO: 3675 - RNA, 38 nt, Artificial Sequence
  Description of Artificial Sequence:  Enzymatic Nucleic Acid
  misc_feature (31)..(31): n stands for inosine
gaauagaacugaugaggccguuaggccgaanaaagaag

SEQ ID NO: 3676 - RNA, 38 nt, Artificial Sequence
  Description of Artificial Sequence:  Enzymatic Nucleic Acid
  misc_feature (31)..(31): n stands for inosine
cgaauagacugaugaggccguuaggccgaangaaagaa

SEQ ID NO: 3677 - RNA, 38 nt, Artificial Sequence
  Description of Artificial Sequence:  Enzymatic Nucleic Acid
  misc_feature (31)..(31): n stands for inosine
ucucgaaucugaugaggccguuaggccgaanaaggaaa

SEQ ID NO: 3678 - RNA, 38 nt, Artificial Sequence
  Description of Artificial Sequence:  Enzymatic Nucleic Acid
  misc_feature (31)..(31): n stands for inosine
ugucgaggcugaugaggccguuaggccgaanaucucga

SEQ ID NO: 3679 - RNA, 38 nt, Artificial Sequence
  Description of Artificial Sequence:  Enzymatic Nucleic Acid
  misc_feature (31)..(31): n stands for inosine
ggugucgacugaugaggccguuaggccgaanagaucuc

SEQ ID NO: 3680 - RNA, 38 nt, Artificial Sequence
  Description of Artificial Sequence:  Enzymatic Nucleic Acid
  misc_feature (31)..(31): n stands for inosine
cggugucgcugaugaggccguuaggccgaangagaucu

SEQ ID NO: 3681 - RNA, 38 nt, Artificial Sequence
  Description of Artificial Sequence:  Enzymatic Nucleic Acid
  misc_feature (31)..(31): n stands for inosine
agaggcggcugaugaggccguuaggccgaanucgagga

SEQ ID NO: 3682 - RNA, 38 nt, Artificial Sequence
  Description of Artificial Sequence:  Enzymatic Nucleic Acid
  misc_feature (31)..(31): n stands for inosine
gcagaggccugaugaggccguuaggccgaanugucgag

SEQ ID NO: 3683 - RNA, 38 nt, Artificial Sequence
  Description of Artificial Sequence:  Enzymatic Nucleic Acid
  misc_feature (31)..(31): n stands for inosine
agagcagacugaugaggccguuaggccgaancgguguc

SEQ ID NO: 3684 - RNA, 38 nt, Artificial Sequence
  Description of Artificial Sequence:  Enzymatic Nucleic Acid
  misc_feature (31)..(31): n stands for inosine
cagagcagcugaugaggccguuaggccgaangcggugu

SEQ ID NO: 3685 - RNA, 38 nt, Artificial Sequence
  Description of Artificial Sequence:  Enzymatic Nucleic Acid
  misc_feature (31)..(31): n stands for inosine
uacagagccugaugaggccguuaggccgaanaggcggu

SEQ ID NO: 3686 - RNA, 38 nt, Artificial Sequence
  Description of Artificial Sequence:  Enzymatic Nucleic Acid
  misc_feature (31)..(31): n stands for inosine
cgauacagcugaugaggccguuaggccgaancagaggc

SEQ ID NO: 3687 - RNA, 38 nt, Artificial Sequence
  Description of Artificial Sequence:  Enzymatic Nucleic Acid
  misc_feature (31)..(31): n stands for inosine
cccgauaccugaugaggccguuaggccgaanagcagag

SEQ ID NO: 3688 - RNA, 38 nt, Artificial Sequence
  Description of Artificial Sequence:  Enzymatic Nucleic Acid
  misc_feature (31)..(31): n stands for inosine
gacucuaacugaugaggccguuaggccgaanccccccg

SEQ ID NO: 3689 - RNA, 38 nt, Artificial Sequence
  Description of Artificial Sequence:  Enzymatic Nucleic Acid
  misc_feature (31)..(31): n stands for inosine
agacucuacugaugaggccguuaggccgaangcccccc

SEQ ID NO: 3690 - RNA, 38 nt, Artificial Sequence
  Description of Artificial Sequence:  Enzymatic Nucleic Acid
  misc_feature (31)..(31): n stands for inosine
uguuccggcugaugaggccguuaggccgaanacucuaa

SEQ ID NO: 3691 - RNA, 38 nt, Artificial Sequence
  Description of Artificial Sequence:  Enzymatic Nucleic Acid
  misc_feature (31)..(31): n stands for inosine
aauguucccugaugaggccguuaggccgaanagacucu

SEQ ID NO: 3692 - RNA, 38 nt, Artificial Sequence
  Description of Artificial Sequence:  Enzymatic Nucleic Acid
  misc_feature (31)..(31): n stands for inosine
gugaacaacugaugaggccguuaggccgaanuuccgga

SEQ ID NO: 3693 - RNA, 38 nt, Artificial Sequence
  Description of Artificial Sequence:  Enzymatic Nucleic Acid
  misc_feature (31)..(31): n stands for inosine
uggugaggcugaugaggccguuaggccgaanaacaaug

SEQ ID NO: 3694 - RNA, 38 nt, Artificial Sequence
  Description of Artificial Sequence:  Enzymatic Nucleic Acid
  misc_feature (31)..(31): n stands for inosine
uauggugacugaugaggccguuaggccgaanugaacaa

SEQ ID NO: 3695 - RNA, 38 nt, Artificial Sequence
  Description of Artificial Sequence:  Enzymatic Nucleic Acid
  misc_feature (31)..(31): n stands for inosine
guauggugcugaugaggccguuaggccgaangugaaca

SEQ ID NO: 3696 - RNA, 38 nt, Artificial Sequence
  Description of Artificial Sequence:  Enzymatic Nucleic Acid
  misc_feature (31)..(31): n stands for inosine
ccguauggcugaugaggccguuaggccgaanaggugaa

SEQ ID NO: 3697 - RNA, 38 nt, Artificial Sequence
  Description of Artificial Sequence:  Enzymatic Nucleic Acid
  misc_feature (31)..(31): n stands for inosine
ugccguaucugaugaggccguuaggccgaanugaggug

SEQ ID NO: 3698 - RNA, 38 nt, Artificial Sequence
  Description of Artificial Sequence:  Enzymatic Nucleic Acid
  misc_feature (31)..(31): n stands for inosine
gugccguacugaugaggccguuaggccgaangugaggu

SEQ ID NO: 3699 - RNA, 38 nt, Artificial Sequence
  Description of Artificial Sequence:  Enzymatic Nucleic Acid
  misc_feature (31)..(31): n stands for inosine
ugccugagcugaugaggccguuaggccgaanccguaug

SEQ ID NO: 3700 - RNA, 38 nt, Artificial Sequence
  Description of Artificial Sequence:  Enzymatic Nucleic Acid
  misc_feature (31)..(31): n stands for inosine
cuugccugcugaugaggccguuaggccgaanugccgua

SEQ ID NO: 3701 - RNA, 38 nt, Artificial Sequence
  Description of Artificial Sequence:  Enzymatic Nucleic Acid
  misc_feature (31)..(31): n stands for inosine
agcuugcccugaugaggccguuaggccgaanagugccg

SEQ ID NO: 3702 - RNA, 38 nt, Artificial Sequence
  Description of Artificial Sequence:  Enzymatic Nucleic Acid
  misc_feature (31)..(31): n stands for inosine
gaauagcucugaugaggccguuaggccgaanccugagu

SEQ ID NO: 3703 - RNA, 38 nt, Artificial Sequence
  Description of Artificial Sequence:  Enzymatic Nucleic Acid
  misc_feature (31)..(31): n stands for inosine
cacagaaucugaugaggccguuaggccgaancuugccu

SEQ ID NO: 3704 - RNA, 38 nt, Artificial Sequence
  Description of Artificial Sequence:  Enzymatic Nucleic Acid
  misc_feature (31)..(31): n stands for inosine
cccaacaccugaugaggccguuaggccgaanaauagcu

SEQ ID NO: 3705 - RNA, 38 nt, Artificial Sequence
  Description of Artificial Sequence:  Enzymatic Nucleic Acid
  misc_feature (31)..(31): n stands for inosine
agguggcucugaugaggccguuaggccgaanauucauc

SEQ ID NO: 3706 - RNA, 38 nt, Artificial Sequence
  Description of Artificial Sequence:  Enzymatic Nucleic Acid
  misc_feature (31)..(31): n stands for inosine
acccaggucugaugaggccguuaggccgaancuagauu

SEQ ID NO: 3707 - RNA, 38 nt, Artificial Sequence
  Description of Artificial Sequence:  Enzymatic Nucleic Acid
  misc_feature (31)..(31): n stands for inosine
cacccaggcugaugaggccguuaggccgaangcuagau

SEQ ID NO: 3708 - RNA, 38 nt, Artificial Sequence
  Description of Artificial Sequence:  Enzymatic Nucleic Acid
  misc_feature (31)..(31): n stands for inosine
cccacccacugaugaggccguuaggccgaanuggcuag

SEQ ID NO: 3709 - RNA, 38 nt, Artificial Sequence
  Description of Artificial Sequence:  Enzymatic Nucleic Acid
  misc_feature (31)..(31): n stands for inosine
ucccaccccugaugaggccguuaggccgaanguggcua

SEQ ID NO: 3710 - RNA, 38 nt, Artificial Sequence
  Description of Artificial Sequence:  Enzymatic Nucleic Acid
  misc_feature (31)..(31): n stands for inosine
uggaugcucugaugaggccguuaggccgaanaucuucc

SEQ ID NO: 3711 - RNA, 38 nt, Artificial Sequence
  Description of Artificial Sequence:  Enzymatic Nucleic Acid
  misc_feature (31)..(31): n stands for inosine
cuggaugccugaugaggccguuaggccgaangaucuuc

SEQ ID NO: 3712 - RNA, 38 nt, Artificial Sequence
  Description of Artificial Sequence:  Enzymatic Nucleic Acid
  misc_feature (31)..(31): n stands for inosine
ucccuggacugaugaggccguuaggccgaancuggauc

SEQ ID NO: 3713 - RNA, 38 nt, Artificial Sequence
  Description of Artificial Sequence:  Enzymatic Nucleic Acid
  misc_feature (31)..(31): n stands for inosine
aauucccucugaugaggccguuaggccgaanaugcugg

SEQ ID NO: 3714 - RNA, 38 nt, Artificial Sequence
  Description of Artificial Sequence:  Enzymatic Nucleic Acid
  misc_feature (31)..(31): n stands for inosine
uaauuccccugaugaggccguuaggccgaangaugcug

SEQ ID NO: 3715 - RNA, 38 nt, Artificial Sequence
  Description of Artificial Sequence:  Enzymatic Nucleic Acid
  misc_feature (31)..(31): n stands for inosine
gacauagccugaugaggccguuaggccgaanacuacua

SEQ ID NO: 3716 - RNA, 38 nt, Artificial Sequence
  Description of Artificial Sequence:  Enzymatic Nucleic Acid
  misc_feature (31)..(31): n stands for inosine
guugacaucugaugaggccguuaggccgaancugacua

SEQ ID NO: 3717 - RNA, 38 nt, Artificial Sequence
  Description of Artificial Sequence:  Enzymatic Nucleic Acid
  misc_feature (31)..(31): n stands for inosine
auuaacgucugaugaggccguuaggccgaanacauagc

SEQ ID NO: 3718 - RNA, 38 nt, Artificial Sequence
  Description of Artificial Sequence:  Enzymatic Nucleic Acid
  misc_feature (31)..(31): n stands for inosine
gauuuuuacugaugaggccguuaggccgaancccauau

SEQ ID NO: 3719 - RNA, 38 nt, Artificial Sequence
  Description of Artificial Sequence:  Enzymatic Nucleic Acid
  misc_feature (31)..(31): n stands for inosine
ugauuuuucugaugaggccguuaggccgaangcccaua

SEQ ID NO: 3720 - RNA, 38 nt, Artificial Sequence
  Description of Artificial Sequence:  Enzymatic Nucleic Acid
  misc_feature (31)..(31): n stands for inosine
uaguuguccugaugaggccguuaggccgaanauuuuua

SEQ ID NO: 3721 - RNA, 38 nt, Artificial Sequence
  Description of Artificial Sequence:  Enzymatic Nucleic Acid
  misc_feature (31)..(31): n stands for inosine
acaauagucugaugaggccguuaggccgaanucugauu

SEQ ID NO: 3722 - RNA, 38 nt, Artificial Sequence
  Description of Artificial Sequence:  Enzymatic Nucleic Acid
  misc_feature (31)..(31): n stands for inosine
accacaaucugaugaggccguuaggccgaanuugucug

SEQ ID NO: 3723 - RNA, 38 nt, Artificial Sequence
  Description of Artificial Sequence:  Enzymatic Nucleic Acid
  misc_feature (31)..(31): n stands for inosine
aggaaaugcugaugaggccguuaggccgaanaaaccac

SEQ ID NO: 3724 - RNA, 38 nt, Artificial Sequence
  Description of Artificial Sequence:  Enzymatic Nucleic Acid
  misc_feature (31)..(31): n stands for inosine
acaggaaacugaugaggccguuaggccgaanugaaacc

SEQ ID NO: 3725 - RNA, 38 nt, Artificial Sequence
  Description of Artificial Sequence:  Enzymatic Nucleic Acid
  misc_feature (31)..(31): n stands for inosine
guaagacacugaugaggccguuaggccgaanaaaugug

SEQ ID NO: 3726 - RNA, 38 nt, Artificial Sequence
  Description of Artificial Sequence:  Enzymatic Nucleic Acid
  misc_feature (31)..(31): n stands for inosine
aguaagaccugaugaggccguuaggccgaangaaaugu

SEQ ID NO: 3727 - RNA, 38 nt, Artificial Sequence
  Description of Artificial Sequence:  Enzymatic Nucleic Acid
  misc_feature (31)..(31): n stands for inosine
caaaaguacugaugaggccguuaggccgaanacaggaa

SEQ ID NO: 3728 - RNA, 38 nt, Artificial Sequence
  Description of Artificial Sequence:  Enzymatic Nucleic Acid
  misc_feature (31)..(31): n stands for inosine
cgcccaaacugaugaggccguuaggccgaanuaagaca

SEQ ID NO: 3729 - RNA, 38 nt, Artificial Sequence
  Description of Artificial Sequence:  Enzymatic Nucleic Acid
  misc_feature (31)..(31): n stands for inosine
ucaagaaccugaugaggccguuaggccgaanuuucucg

SEQ ID NO: 3730 - RNA, 38 nt, Artificial Sequence
  Description of Artificial Sequence:  Enzymatic Nucleic Acid
  misc_feature (31)..(31): n stands for inosine
aauauucacugaugaggccguuaggccgaanaacaguu

SEQ ID NO: 3731 - RNA, 38 nt, Artificial Sequence
  Description of Artificial Sequence:  Enzymatic Nucleic Acid
  misc_feature (31)..(31): n stands for inosine
acuccaaacugaugaggccguuaggccgaanacaccaa

SEQ ID NO: 3732 - RNA, 38 nt, Artificial Sequence
  Description of Artificial Sequence:  Enzymatic Nucleic Acid
  misc_feature (31)..(31): n stands for inosine
aggaggagcugaugaggccguuaggccgaancgaaucc

SEQ ID NO: 3733 - RNA, 38 nt, Artificial Sequence
  Description of Artificial Sequence:  Enzymatic Nucleic Acid
  misc_feature (31)..(31): n stands for inosine
gcaggaggcugaugaggccguuaggccgaanugcgaau

SEQ ID NO: 3734 - RNA, 38 nt, Artificial Sequence
  Description of Artificial Sequence:  Enzymatic Nucleic Acid
  misc_feature (31)..(31): n stands for inosine
augcaggacugaugaggccguuaggccgaanagugcga

SEQ ID NO: 3735 - RNA, 38 nt, Artificial Sequence
  Description of Artificial Sequence:  Enzymatic Nucleic Acid
  misc_feature (31)..(31): n stands for inosine
uaugcaggcugaugaggccguuaggccgaangagugcg

SEQ ID NO: 3736 - RNA, 38 nt, Artificial Sequence
  Description of Artificial Sequence:  Enzymatic Nucleic Acid
  misc_feature (31)..(31): n stands for inosine
uauaugcacugaugaggccguuaggccgaanaggagug

SEQ ID NO: 3737 - RNA, 38 nt, Artificial Sequence
  Description of Artificial Sequence:  Enzymatic Nucleic Acid
  misc_feature (31)..(31): n stands for inosine
cuauaugccugaugaggccguuaggccgaangaggagu

SEQ ID NO: 3738 - RNA, 38 nt, Artificial Sequence
  Description of Artificial Sequence:  Enzymatic Nucleic Acid
  misc_feature (31)..(31): n stands for inosine
ggucuauacugaugaggccguuaggccgaancaggagg

SEQ ID NO: 3739 - RNA, 38 nt, Artificial Sequence
  Description of Artificial Sequence:  Enzymatic Nucleic Acid
  misc_feature (31)..(31): n stands for inosine
cauuuggucugaugaggccguuaggccgaanucuauau

SEQ ID NO: 3740 - RNA, 38 nt, Artificial Sequence
  Description of Artificial Sequence:  Enzymatic Nucleic Acid
  misc_feature (31)..(31): n stands for inosine
gcauuuggcugaugaggccguuaggccgaangucuaua

SEQ ID NO: 3741 - RNA, 38 nt, Artificial Sequence
  Description of Artificial Sequence:  Enzymatic Nucleic Acid
  misc_feature (31)..(31): n stands for inosine
gggcauuucugaugaggccguuaggccgaanuggucua

SEQ ID NO: 3742 - RNA, 38 nt, Artificial Sequence
  Description of Artificial Sequence:  Enzymatic Nucleic Acid
  misc_feature (31)..(31): n stands for inosine
ggggcauucugaugaggccguuaggccgaanguggucu

SEQ ID NO: 3743 - RNA, 38 nt, Artificial Sequence
  Description of Artificial Sequence:  Enzymatic Nucleic Acid
  misc_feature (31)..(31): n stands for inosine
aagauaggcugaugaggccguuaggccgaancauuugg

SEQ ID NO: 3744 - RNA, 38 nt, Artificial Sequence
  Description of Artificial Sequence:  Enzymatic Nucleic Acid
  misc_feature (31)..(31): n stands for inosine
uaagauagcugaugaggccguuaggccgaangcauuug

SEQ ID NO: 3745 - RNA, 38 nt, Artificial Sequence
  Description of Artificial Sequence:  Enzymatic Nucleic Acid
  misc_feature (31)..(31): n stands for inosine
auaagauacugaugaggccguuaggccgaanggcauuu

SEQ ID NO: 3746 - RNA, 38 nt, Artificial Sequence
  Description of Artificial Sequence:  Enzymatic Nucleic Acid
  misc_feature (31)..(31): n stands for inosine
gauaagaucugaugaggccguuaggccgaangggcauu

SEQ ID NO: 3747 - RNA, 38 nt, Artificial Sequence
  Description of Artificial Sequence:  Enzymatic Nucleic Acid
  misc_feature (31)..(31): n stands for inosine
uguugauacugaugaggccguuaggccgaanauagggg

SEQ ID NO: 3748 - RNA, 38 nt, Artificial Sequence
  Description of Artificial Sequence:  Enzymatic Nucleic Acid
  misc_feature (31)..(31): n stands for inosine
ggaagugucugaugaggccguuaggccgaanauaagau

SEQ ID NO: 3749 - RNA, 38 nt, Artificial Sequence
  Description of Artificial Sequence:  Enzymatic Nucleic Acid
  misc_feature (31)..(31): n stands for inosine
uccggaagcugaugaggccguuaggccgaanuugauaa

SEQ ID NO: 3750 - RNA, 38 nt, Artificial Sequence
  Description of Artificial Sequence:  Enzymatic Nucleic Acid
  misc_feature (31)..(31): n stands for inosine
uuuccggacugaugaggccguuaggccgaanuguugau

SEQ ID NO: 3751 - RNA, 38 nt, Artificial Sequence
  Description of Artificial Sequence:  Enzymatic Nucleic Acid
  misc_feature (31)..(31): n stands for inosine
uaguuucccugaugaggccguuaggccgaanaaguguu

SEQ ID NO: 3752 - RNA, 38 nt, Artificial Sequence
  Description of Artificial Sequence:  Enzymatic Nucleic Acid
  misc_feature (31)..(31): n stands for inosine
acaacagucugaugaggccguuaggccgaanuuuccgg

SEQ ID NO: 3753 - RNA, 38 nt, Artificial Sequence
  Description of Artificial Sequence:  Enzymatic Nucleic Acid
  misc_feature (31)..(31): n stands for inosine
cuaacaaccugaugaggccguuaggccgaanuaguuuc

SEQ ID NO: 3754 - RNA, 38 nt, Artificial Sequence
  Description of Artificial Sequence:  Enzymatic Nucleic Acid
  misc_feature (31)..(31): n stands for inosine
aggggacccugaugaggccguuaggccgaanccucuuc

SEQ ID NO: 3755 - RNA, 38 nt, Artificial Sequence
  Description of Artificial Sequence:  Enzymatic Nucleic Acid
  misc_feature (31)..(31): n stands for inosine
cuucuaggcugaugaggccguuaggccgaanaccugcc

SEQ ID NO: 3756 - RNA, 38 nt, Artificial Sequence
  Description of Artificial Sequence:  Enzymatic Nucleic Acid
  misc_feature (31)..(31): n stands for inosine
ucuucuagcugaugaggccguuaggccgaangaccugc

SEQ ID NO: 3757 - RNA, 38 nt, Artificial Sequence
  Description of Artificial Sequence:  Enzymatic Nucleic Acid
  misc_feature (31)..(31): n stands for inosine
uucuucuacugaugaggccguuaggccgaanggaccug

SEQ ID NO: 3758 - RNA, 38 nt, Artificial Sequence
  Description of Artificial Sequence:  Enzymatic Nucleic Acid
  misc_feature (31)..(31): n stands for inosine
cuucuucucugaugaggccguuaggccgaangggaccu

SEQ ID NO: 3759 - RNA, 38 nt, Artificial Sequence
  Description of Artificial Sequence:  Enzymatic Nucleic Acid
  misc_feature (31)..(31): n stands for inosine
ggcgagggcugaugaggccguuaggccgaanuucuucu

SEQ ID NO: 3760 - RNA, 38 nt, Artificial Sequence
  Description of Artificial Sequence:  Enzymatic Nucleic Acid
  misc_feature (31)..(31): n stands for inosine
gaggcgagcugaugaggccguuaggccgaanaguucuu

SEQ ID NO: 3761 - RNA, 38 nt, Artificial Sequence
  Description of Artificial Sequence:  Enzymatic Nucleic Acid
  misc_feature (31)..(31): n stands for inosine
cgaggcgacugaugaggccguuaggccgaangaguucu

SEQ ID NO: 3762 - RNA, 38 nt, Artificial Sequence
  Description of Artificial Sequence:  Enzymatic Nucleic Acid
  misc_feature (31)..(31): n stands for inosine
gcgaggcgcugaugaggccguuaggccgaanggaguuc

SEQ ID NO: 3763 - RNA, 38 nt, Artificial Sequence
  Description of Artificial Sequence:  Enzymatic Nucleic Acid
  misc_feature (31)..(31): n stands for inosine
gucugcgacugaugaggccguuaggccgaancgaggga

SEQ ID NO: 3764 - RNA, 38 nt, Artificial Sequence
  Description of Artificial Sequence:  Enzymatic Nucleic Acid
  misc_feature (31)..(31): n stands for inosine
cgucugcgcugaugaggccguuaggccgaangcgaggg

SEQ ID NO: 3765 - RNA, 38 nt, Artificial Sequence
  Description of Artificial Sequence:  Enzymatic Nucleic Acid
  misc_feature (31)..(31): n stands for inosine
ccuucguccugaugaggccguuaggccgaancgaggcg

SEQ ID NO: 3766 - RNA, 38 nt, Artificial Sequence
  Description of Artificial Sequence:  Enzymatic Nucleic Acid
  misc_feature (31)..(31): n stands for inosine
ggcgauugcugaugaggccguuaggccgaanaccuucg

SEQ ID NO: 3767 - RNA, 38 nt, Artificial Sequence
  Description of Artificial Sequence:  Enzymatic Nucleic Acid
  misc_feature (31)..(31): n stands for inosine
gcggcgaucugaugaggccguuaggccgaanagaccuu

SEQ ID NO: 3768 - RNA, 38 nt, Artificial Sequence
  Description of Artificial Sequence:  Enzymatic Nucleic Acid
  misc_feature (31)..(31): n stands for inosine
ugcgacgccugaugaggccguuaggccgaancgauuga

SEQ ID NO: 3769 - RNA, 38 nt, Artificial Sequence
  Description of Artificial Sequence:  Enzymatic Nucleic Acid
  misc_feature (31)..(31): n stands for inosine
agaucuuccugaugaggccguuaggccgaancgacgcg

SEQ ID NO: 3770 - RNA, 38 nt, Artificial Sequence
  Description of Artificial Sequence:  Enzymatic Nucleic Acid
  misc_feature (31)..(31): n stands for inosine
cgagauugcugaugaggccguuaggccgaanaucuucu

SEQ ID NO: 3771 - RNA, 38 nt, Artificial Sequence
  Description of Artificial Sequence:  Enzymatic Nucleic Acid
  misc_feature (31)..(31): n stands for inosine
cccgagaucugaugaggccguuaggccgaanagaucuu

SEQ ID NO: 3772 - RNA, 38 nt, Artificial Sequence
  Description of Artificial Sequence:  Enzymatic Nucleic Acid
  misc_feature (31)..(31): n stands for inosine
gauucccgcugaugaggccguuaggccgaanauugaga

SEQ ID NO: 3773 - RNA, 38 nt, Artificial Sequence
  Description of Artificial Sequence:  Enzymatic Nucleic Acid
  misc_feature (31)..(31): n stands for inosine
uaacauugcugaugaggccguuaggccgaanauucccg

SEQ ID NO: 3774 - RNA, 38 nt, Artificial Sequence
  Description of Artificial Sequence:  Enzymatic Nucleic Acid
  misc_feature (31)..(31): n stands for inosine
acuaacaucugaugaggccguuaggccgaanagauucc

SEQ ID NO: 3775 - RNA, 38 nt, Artificial Sequence
  Description of Artificial Sequence:  Enzymatic Nucleic Acid
  misc_feature (31)..(31): n stands for inosine
guguccaacugaugaggccguuaggccgaanaauacua

SEQ ID NO: 3776 - RNA, 38 nt, Artificial Sequence
  Description of Artificial Sequence:  Enzymatic Nucleic Acid
  misc_feature (31)..(31): n stands for inosine
uguguccacugaugaggccguuaggccgaangaauacu

SEQ ID NO: 3777 - RNA, 38 nt, Artificial Sequence
  Description of Artificial Sequence:  Enzymatic Nucleic Acid
  misc_feature (31)..(31): n stands for inosine
accuuaugcugaugaggccguuaggccgaanuccaagg

SEQ ID NO: 3778 - RNA, 38 nt, Artificial Sequence
  Description of Artificial Sequence:  Enzymatic Nucleic Acid
  misc_feature (31)..(31): n stands for inosine
ccaccuuacugaugaggccguuaggccgaanuguccaa

SEQ ID NO: 3779 - RNA, 38 nt, Artificial Sequence
  Description of Artificial Sequence:  Enzymatic Nucleic Acid
  misc_feature (31)..(31): n stands for inosine
ccccguaacugaugaggccguuaggccgaanuuuccca

SEQ ID NO: 3780 - RNA, 38 nt, Artificial Sequence
  Description of Artificial Sequence:  Enzymatic Nucleic Acid
  misc_feature (31)..(31): n stands for inosine
aagaauaacugaugaggccguuaggccgaanccccgua

SEQ ID NO: 3781 - RNA, 38 nt, Artificial Sequence
  Description of Artificial Sequence:  Enzymatic Nucleic Acid
  misc_feature (31)..(31): n stands for inosine
accguagacugaugaggccguuaggccgaanaauaaag

SEQ ID NO: 3782 - RNA, 38 nt, Artificial Sequence
  Description of Artificial Sequence:  Enzymatic Nucleic Acid
  misc_feature (31)..(31): n stands for inosine
gguaccgucugaugaggccguuaggccgaanaagaaua

SEQ ID NO: 3783 - RNA, 38 nt, Artificial Sequence
  Description of Artificial Sequence:  Enzymatic Nucleic Acid
  misc_feature (31)..(31): n stands for inosine
uaaagcaacugaugaggccguuaggccgaanuaccgua

SEQ ID NO: 3784 - RNA, 38 nt, Artificial Sequence
  Description of Artificial Sequence:  Enzymatic Nucleic Acid
  misc_feature (31)..(31): n stands for inosine
uuaaagcacugaugaggccguuaggccgaanguaccgu

SEQ ID NO: 3785 - RNA, 38 nt, Artificial Sequence
  Description of Artificial Sequence:  Enzymatic Nucleic Acid
  misc_feature (31)..(31): n stands for inosine
aggauuaacugaugaggccguuaggccgaancaaggua

SEQ ID NO: 3786 - RNA, 38 nt, Artificial Sequence
  Description of Artificial Sequence:  Enzymatic Nucleic Acid
  misc_feature (31)..(31): n stands for inosine
gccauuuacugaugaggccguuaggccgaanauuaaag

SEQ ID NO: 3787 - RNA, 38 nt, Artificial Sequence
  Description of Artificial Sequence:  Enzymatic Nucleic Acid
  misc_feature (31)..(31): n stands for inosine
ugccauuucugaugaggccguuaggccgaangauuaaa

SEQ ID NO: 3788 - RNA, 38 nt, Artificial Sequence
  Description of Artificial Sequence:  Enzymatic Nucleic Acid
  misc_feature (31)..(31): n stands for inosine
aaggaguucugaugaggccguuaggccgaanccauuua

SEQ ID NO: 3789 - RNA, 38 nt, Artificial Sequence
  Description of Artificial Sequence:  Enzymatic Nucleic Acid
  misc_feature (31)..(31): n stands for inosine
aaagaaggcugaugaggccguuaggccgaanuuugcca

SEQ ID NO: 3790 - RNA, 38 nt, Artificial Sequence
  Description of Artificial Sequence:  Enzymatic Nucleic Acid
  misc_feature (31)..(31): n stands for inosine
gaaaagaacugaugaggccguuaggccgaanaguuugc

SEQ ID NO: 3791 - RNA, 38 nt, Artificial Sequence
  Description of Artificial Sequence:  Enzymatic Nucleic Acid
  misc_feature (31)..(31): n stands for inosine
ggaaaagacugaugaggccguuaggccgaangaguuug

SEQ ID NO: 3792 - RNA, 38 nt, Artificial Sequence
  Description of Artificial Sequence:  Enzymatic Nucleic Acid
  misc_feature (31)..(31): n stands for inosine
ucaggaaacugaugaggccguuaggccgaanaaggagu

SEQ ID NO: 3793 - RNA, 38 nt, Artificial Sequence
  Description of Artificial Sequence:  Enzymatic Nucleic Acid
  misc_feature (31)..(31): n stands for inosine
gaaugucacugaugaggccguuaggccgaanaaaagaa

SEQ ID NO: 3794 - RNA, 38 nt, Artificial Sequence
  Description of Artificial Sequence:  Enzymatic Nucleic Acid
  misc_feature (31)..(31): n stands for inosine
ugaauguccugaugaggccguuaggccgaangaaaaga

SEQ ID NO: 3795 - RNA, 38 nt, Artificial Sequence
  Description of Artificial Sequence:  Enzymatic Nucleic Acid
  misc_feature (31)..(31): n stands for inosine
caaaugaacugaugaggccguuaggccgaanucaggaa

SEQ ID NO: 3796 - RNA, 38 nt, Artificial Sequence
  Description of Artificial Sequence:  Enzymatic Nucleic Acid
  misc_feature (31)..(31): n stands for inosine
ccugcaaacugaugaggccguuaggccgaanaauguca

SEQ ID NO: 3797 - RNA, 38 nt, Artificial Sequence
  Description of Artificial Sequence:  Enzymatic Nucleic Acid
  misc_feature (31)..(31): n stands for inosine
uguccucccugaugaggccguuaggccgaancaaauga

SEQ ID NO: 3798 - RNA, 38 nt, Artificial Sequence
  Description of Artificial Sequence:  Enzymatic Nucleic Acid
  misc_feature (31)..(31): n stands for inosine
aucaacaacugaugaggccguuaggccgaanuccuccu

SEQ ID NO: 3799 - RNA, 38 nt, Artificial Sequence
  Description of Artificial Sequence:  Enzymatic Nucleic Acid
  misc_feature (31)..(31): n stands for inosine
ccacaaaucugaugaggccguuaggccgaancuuacau

SEQ ID NO: 3800 - RNA, 38 nt, Artificial Sequence
  Description of Artificial Sequence:  Enzymatic Nucleic Acid
  misc_feature (31)..(31): n stands for inosine
cuguaaggcugaugaggccguuaggccgaanccccaca

SEQ ID NO: 3801 - RNA, 38 nt, Artificial Sequence
  Description of Artificial Sequence:  Enzymatic Nucleic Acid
  misc_feature (31)..(31): n stands for inosine
acuguaagcugaugaggccguuaggccgaangccccac

SEQ ID NO: 3802 - RNA, 38 nt, Artificial Sequence
  Description of Artificial Sequence:  Enzymatic Nucleic Acid
  misc_feature (31)..(31): n stands for inosine
uacuguaacugaugaggccguuaggccgaanggcccca

SEQ ID NO: 3803 - RNA, 38 nt, Artificial Sequence
  Description of Artificial Sequence:  Enzymatic Nucleic Acid
  misc_feature (31)..(31): n stands for inosine
uuacuguacugaugaggccguuaggccgaangggcccc

SEQ ID NO: 3804 - RNA, 38 nt, Artificial Sequence
  Description of Artificial Sequence:  Enzymatic Nucleic Acid
  misc_feature (31)..(31): n stands for inosine
ucauuuaccugaugaggccguuaggccgaanuaagggg

SEQ ID NO: 3805 - RNA, 38 nt, Artificial Sequence
  Description of Artificial Sequence:  Enzymatic Nucleic Acid
  misc_feature (31)..(31): n stands for inosine
aagucucccugaugaggccguuaggccgaanuuuucau

SEQ ID NO: 3806 - RNA, 38 nt, Artificial Sequence
  Description of Artificial Sequence:  Enzymatic Nucleic Acid
  misc_feature (31)..(31): n stands for inosine
uuaauuuacugaugaggccguuaggccgaanucuccug

SEQ ID NO: 3807 - RNA, 38 nt, Artificial Sequence
  Description of Artificial Sequence:  Enzymatic Nucleic Acid
  misc_feature (31)..(31): n stands for inosine
gcaggcaucugaugaggccguuaggccgaanuuaauuu

SEQ ID NO: 3808 - RNA, 38 nt, Artificial Sequence
  Description of Artificial Sequence:  Enzymatic Nucleic Acid
  misc_feature (31)..(31): n stands for inosine
accuagcacugaugaggccguuaggccgaancauaguu

SEQ ID NO: 3809 - RNA, 38 nt, Artificial Sequence
  Description of Artificial Sequence:  Enzymatic Nucleic Acid
  misc_feature (31)..(31): n stands for inosine
aaccuagccugaugaggccguuaggccgaangcauagu

SEQ ID NO: 3810 - RNA, 38 nt, Artificial Sequence
  Description of Artificial Sequence:  Enzymatic Nucleic Acid
  misc_feature (31)..(31): n stands for inosine
uaaaaccucugaugaggccguuaggccgaancaggcau

SEQ ID NO: 3811 - RNA, 38 nt, Artificial Sequence
  Description of Artificial Sequence:  Enzymatic Nucleic Acid
  misc_feature (31)..(31): n stands for inosine
uaacauugcugaugaggccguuaggccgaanauaaaac

SEQ ID NO: 3812 - RNA, 38 nt, Artificial Sequence
  Description of Artificial Sequence:  Enzymatic Nucleic Acid
  misc_feature (31)..(31): n stands for inosine
guaacauucugaugaggccguuaggccgaangauaaaa

SEQ ID NO: 3813 - RNA, 38 nt, Artificial Sequence
  Description of Artificial Sequence:  Enzymatic Nucleic Acid
  misc_feature (31)..(31): n stands for inosine
aguaacaucugaugaggccguuaggccgaanggauaaa

SEQ ID NO: 3814 - RNA, 38 nt, Artificial Sequence
  Description of Artificial Sequence:  Enzymatic Nucleic Acid
  misc_feature (31)..(31): n stands for inosine
aaauauuucugaugaggccguuaggccgaanuaacauu

SEQ ID NO: 3815 - RNA, 38 nt, Artificial Sequence
  Description of Artificial Sequence:  Enzymatic Nucleic Acid
  misc_feature (31)..(31): n stands for inosine
uaucuaagcugaugaggccguuaggccgaancaaauau

SEQ ID NO: 3816 - RNA, 38 nt, Artificial Sequence
  Description of Artificial Sequence:  Enzymatic Nucleic Acid
  misc_feature (31)..(31): n stands for inosine
uuaucuaacugaugaggccguuaggccgaangcaaaua

SEQ ID NO: 3817 - RNA, 38 nt, Artificial Sequence
  Description of Artificial Sequence:  Enzymatic Nucleic Acid
  misc_feature (31)..(31): n stands for inosine
uuuaucuacugaugaggccguuaggccgaanggcaaau

SEQ ID NO: 3818 - RNA, 38 nt, Artificial Sequence
  Description of Artificial Sequence:  Enzymatic Nucleic Acid
  misc_feature (31)..(31): n stands for inosine
auacgguucugaugaggccguuaggccgaanaucccuu

SEQ ID NO: 3819 - RNA, 38 nt, Artificial Sequence
  Description of Artificial Sequence:  Enzymatic Nucleic Acid
  misc_feature (31)..(31): n stands for inosine
gauaauaccugaugaggccguuaggccgaanuuugauc

SEQ ID NO: 3820 - RNA, 38 nt, Artificial Sequence
  Description of Artificial Sequence:  Enzymatic Nucleic Acid
  misc_feature (31)..(31): n stands for inosine
cauacucucugaugaggccguuaggccgaanauaauac

SEQ ID NO: 3821 - RNA, 38 nt, Artificial Sequence
  Description of Artificial Sequence:  Enzymatic Nucleic Acid
  misc_feature (31)..(31): n stands for inosine
acauacuccugaugaggccguuaggccgaangauaaua

SEQ ID NO: 3822 - RNA, 38 nt, Artificial Sequence
  Description of Artificial Sequence:  Enzymatic Nucleic Acid
  misc_feature (31)..(31): n stands for inosine
ggaaguaacugaugaggccguuaggccgaanauuaacu

SEQ ID NO: 3823 - RNA, 38 nt, Artificial Sequence
  Description of Artificial Sequence:  Enzymatic Nucleic Acid
  misc_feature (31)..(31): n stands for inosine
cgucuggacugaugaggccguuaggccgaanuaaugau

SEQ ID NO: 3824 - RNA, 38 nt, Artificial Sequence
  Description of Artificial Sequence:  Enzymatic Nucleic Acid
  misc_feature (31)..(31): n stands for inosine
ucgcgucucugaugaggccguuaggccgaanaaguaau

SEQ ID NO: 3825 - RNA, 38 nt, Artificial Sequence
  Description of Artificial Sequence:  Enzymatic Nucleic Acid
  misc_feature (31)..(31): n stands for inosine
gucgcguccugaugaggccguuaggccgaangaaguaa

SEQ ID NO: 3826 - RNA, 38 nt, Artificial Sequence
  Description of Artificial Sequence:  Enzymatic Nucleic Acid
  misc_feature (31)..(31): n stands for inosine
guaaauaacugaugaggccguuaggccgaanucgcguc

SEQ ID NO: 3827 - RNA, 38 nt, Artificial Sequence
  Description of Artificial Sequence:  Enzymatic Nucleic Acid
  misc_feature (31)..(31): n stands for inosine
aaagagugcugaugaggccguuaggccgaanuaaauaa

SEQ ID NO: 3828 - RNA, 38 nt, Artificial Sequence
  Description of Artificial Sequence:  Enzymatic Nucleic Acid
  misc_feature (31)..(31): n stands for inosine
ccaaagagcugaugaggccguuaggccgaanuguaaau

SEQ ID NO: 3829 - RNA, 38 nt, Artificial Sequence
  Description of Artificial Sequence:  Enzymatic Nucleic Acid
  misc_feature (31)..(31): n stands for inosine
uuccaaagcugaugaggccguuaggccgaanuguguaa

SEQ ID NO: 3830 - RNA, 38 nt, Artificial Sequence
  Description of Artificial Sequence:  Enzymatic Nucleic Acid
  misc_feature (31)..(31): n stands for inosine
ccuuccaacugaugaggccguuaggccgaanagugugu

SEQ ID NO: 3831 - RNA, 38 nt, Artificial Sequence
  Description of Artificial Sequence:  Enzymatic Nucleic Acid
  misc_feature (31)..(31): n stands for inosine
uuuauauacugaugaggccguuaggccgaanauccccg

SEQ ID NO: 3832 - RNA, 38 nt, Artificial Sequence
  Description of Artificial Sequence:  Enzymatic Nucleic Acid
  misc_feature (31)..(31): n stands for inosine
cuacgugucugaugaggccguuaggccgaanacucucu

SEQ ID NO: 3833 - RNA, 38 nt, Artificial Sequence
  Description of Artificial Sequence:  Enzymatic Nucleic Acid
  misc_feature (31)..(31): n stands for inosine
gcuacgugcugaugaggccguuaggccgaangacucuc

SEQ ID NO: 3834 - RNA, 38 nt, Artificial Sequence
  Description of Artificial Sequence:  Enzymatic Nucleic Acid
  misc_feature (31)..(31): n stands for inosine
gcgcuacgcugaugaggccguuaggccgaanuggacuc

SEQ ID NO: 3835 - RNA, 38 nt, Artificial Sequence
  Description of Artificial Sequence:  Enzymatic Nucleic Acid
  misc_feature (31)..(31): n stands for inosine
caaaaugacugaugaggccguuaggccgaancgcuacg

SEQ ID NO: 3836 - RNA, 38 nt, Artificial Sequence
  Description of Artificial Sequence:  Enzymatic Nucleic Acid
  misc_feature (31)..(31): n stands for inosine
gcaaaaugcugaugaggccguuaggccgaangcgcuac

SEQ ID NO: 3837 - RNA, 38 nt, Artificial Sequence
  Description of Artificial Sequence:  Enzymatic Nucleic Acid
  misc_feature (31)..(31): n stands for inosine
ccgcaaaacugaugaggccguuaggccgaanaggcgcu

SEQ ID NO: 3838 - RNA, 38 nt, Artificial Sequence
  Description of Artificial Sequence:  Enzymatic Nucleic Acid
  misc_feature (31)..(31): n stands for inosine
gaauauggcugaugaggccguuaggccgaanacccgca

SEQ ID NO: 3839 - RNA, 38 nt, Artificial Sequence
  Description of Artificial Sequence:  Enzymatic Nucleic Acid
  misc_feature (31)..(31): n stands for inosine
aagaauaucugaugaggccguuaggccgaanugacccg

SEQ ID NO: 3840 - RNA, 38 nt, Artificial Sequence
  Description of Artificial Sequence:  Enzymatic Nucleic Acid
  misc_feature (31)..(31): n stands for inosine
caagaauacugaugaggccguuaggccgaangugaccc

SEQ ID NO: 3841 - RNA, 38 nt, Artificial Sequence
  Description of Artificial Sequence:  Enzymatic Nucleic Acid
  misc_feature (31)..(31): n stands for inosine
uguucccacugaugaggccguuaggccgaanaauaugg

SEQ ID NO: 3842 - RNA, 38 nt, Artificial Sequence
  Description of Artificial Sequence:  Enzymatic Nucleic Acid
  misc_feature (31)..(31): n stands for inosine
guagaucucugaugaggccguuaggccgaanuucccaa

SEQ ID NO: 3843 - RNA, 38 nt, Artificial Sequence
  Description of Artificial Sequence:  Enzymatic Nucleic Acid
  misc_feature (31)..(31): n stands for inosine
caugcugucugaugaggccguuaggccgaanaucuugu

SEQ ID NO: 3844 - RNA, 38 nt, Artificial Sequence
  Description of Artificial Sequence:  Enzymatic Nucleic Acid
  misc_feature (31)..(31): n stands for inosine
ucccaugccugaugaggccguuaggccgaanuagaucu

SEQ ID NO: 3845 - RNA, 38 nt, Artificial Sequence
  Description of Artificial Sequence:  Enzymatic Nucleic Acid
  misc_feature (31)..(31): n stands for inosine
accucccacugaugaggccguuaggccgaancuguaga

SEQ ID NO: 3846 - RNA, 38 nt, Artificial Sequence
  Description of Artificial Sequence:  Enzymatic Nucleic Acid
  misc_feature (31)..(31): n stands for inosine
gguuuggacugaugaggccguuaggccgaanaccaacc

SEQ ID NO: 3847 - RNA, 38 nt, Artificial Sequence
  Description of Artificial Sequence:  Enzymatic Nucleic Acid
  misc_feature (31)..(31): n stands for inosine
cgagguuucugaugaggccguuaggccgaanaagacca

SEQ ID NO: 3848 - RNA, 38 nt, Artificial Sequence
  Description of Artificial Sequence:  Enzymatic Nucleic Acid
  misc_feature (31)..(31): n stands for inosine
ucgagguucugaugaggccguuaggccgaangaagacc

SEQ ID NO: 3849 - RNA, 38 nt, Artificial Sequence
  Description of Artificial Sequence:  Enzymatic Nucleic Acid
  misc_feature (31)..(31): n stands for inosine
cuuuucgacugaugaggccguuaggccgaanuuuggaa

SEQ ID NO: 3850 - RNA, 38 nt, Artificial Sequence
  Description of Artificial Sequence:  Enzymatic Nucleic Acid
  misc_feature (31)..(31): n stands for inosine
ccuuuucgcugaugaggccguuaggccgaanguuugga

SEQ ID NO: 3851 - RNA, 38 nt, Artificial Sequence
  Description of Artificial Sequence:  Enzymatic Nucleic Acid
  misc_feature (31)..(31): n stands for inosine
uguccccacugaugaggccguuaggccgaanccuuuuc

SEQ ID NO: 3852 - RNA, 38 nt, Artificial Sequence
  Description of Artificial Sequence:  Enzymatic Nucleic Acid
  misc_feature (31)..(31): n stands for inosine
gaaagauucugaugaggccguuaggccgaanuccccau

SEQ ID NO: 3853 - RNA, 38 nt, Artificial Sequence
  Description of Artificial Sequence:  Enzymatic Nucleic Acid
  misc_feature (31)..(31): n stands for inosine
ggacagaacugaugaggccguuaggccgaanauuuguc

SEQ ID NO: 3854 - RNA, 38 nt, Artificial Sequence
  Description of Artificial Sequence:  Enzymatic Nucleic Acid
  misc_feature (31)..(31): n stands for inosine
uuggggaccugaugaggccguuaggccgaanaaagauu

SEQ ID NO: 3855 - RNA, 38 nt, Artificial Sequence
  Description of Artificial Sequence:  Enzymatic Nucleic Acid
  misc_feature (31)..(31): n stands for inosine
gggauuggcugaugaggccguuaggccgaanacagaaa

SEQ ID NO: 3856 - RNA, 38 nt, Artificial Sequence
  Description of Artificial Sequence:  Enzymatic Nucleic Acid
  misc_feature (31)..(31): n stands for inosine
ggggauugcugaugaggccguuaggccgaangacagaa

SEQ ID NO: 3857 - RNA, 38 nt, Artificial Sequence
  Description of Artificial Sequence:  Enzymatic Nucleic Acid
  misc_feature (31)..(31): n stands for inosine
aggggauucugaugaggccguuaggccgaanggacaga

SEQ ID NO: 3858 - RNA, 38 nt, Artificial Sequence
  Description of Artificial Sequence:  Enzymatic Nucleic Acid
  misc_feature (31)..(31): n stands for inosine
caggggaucugaugaggccguuaggccgaangggacag

SEQ ID NO: 3859 - RNA, 38 nt, Artificial Sequence
  Description of Artificial Sequence:  Enzymatic Nucleic Acid
  misc_feature (31)..(31): n stands for inosine
aucccaggcugaugaggccguuaggccgaanauugggg

SEQ ID NO: 3860 - RNA, 38 nt, Artificial Sequence
  Description of Artificial Sequence:  Enzymatic Nucleic Acid
  misc_feature (31)..(31): n stands for inosine
aaucccagcugaugaggccguuaggccgaangauuggg

SEQ ID NO: 3861 - RNA, 38 nt, Artificial Sequence
  Description of Artificial Sequence:  Enzymatic Nucleic Acid
  misc_feature (31)..(31): n stands for inosine
gaaucccacugaugaggccguuaggccgaanggauugg

SEQ ID NO: 3862 - RNA, 38 nt, Artificial Sequence
  Description of Artificial Sequence:  Enzymatic Nucleic Acid
  misc_feature (31)..(31): n stands for inosine
agaauccccugaugaggccguuaggccgaangggauug

SEQ ID NO: 3863 - RNA, 38 nt, Artificial Sequence
  Description of Artificial Sequence:  Enzymatic Nucleic Acid
  misc_feature (31)..(31): n stands for inosine
aucggggacugaugaggccguuaggccgaanaauccca

SEQ ID NO: 3864 - RNA, 38 nt, Artificial Sequence
  Description of Artificial Sequence:  Enzymatic Nucleic Acid
  misc_feature (31)..(31): n stands for inosine
augaucggcugaugaggccguuaggccgaanaagaauc

SEQ ID NO: 3865 - RNA, 38 nt, Artificial Sequence
  Description of Artificial Sequence:  Enzymatic Nucleic Acid
  misc_feature (31)..(31): n stands for inosine
gaugaucgcugaugaggccguuaggccgaangaagaau

SEQ ID NO: 3866 - RNA, 38 nt, Artificial Sequence
  Description of Artificial Sequence:  Enzymatic Nucleic Acid
  misc_feature (31)..(31): n stands for inosine
ugaugauccugaugaggccguuaggccgaanggaagaa

SEQ ID NO: 3867 - RNA, 38 nt, Artificial Sequence
  Description of Artificial Sequence:  Enzymatic Nucleic Acid
  misc_feature (31)..(31): n stands for inosine
ccaacugacugaugaggccguuaggccgaanaucgggg

SEQ ID NO: 3868 - RNA, 38 nt, Artificial Sequence
  Description of Artificial Sequence:  Enzymatic Nucleic Acid
  misc_feature (31)..(31): n stands for inosine
gguccaaccugaugaggccguuaggccgaanaugaucg

SEQ ID NO: 3869 - RNA, 38 nt, Artificial Sequence
  Description of Artificial Sequence:  Enzymatic Nucleic Acid
  misc_feature (31)..(31): n stands for inosine
gaaugcagcugaugaggccguuaggccgaanuccaacu

SEQ ID NO: 3870 - RNA, 38 nt, Artificial Sequence
  Description of Artificial Sequence:  Enzymatic Nucleic Acid
  misc_feature (31)..(31): n stands for inosine
ugaaugcacugaugaggccguuaggccgaanguccaac

SEQ ID NO: 3871 - RNA, 38 nt, Artificial Sequence
  Description of Artificial Sequence:  Enzymatic Nucleic Acid
  misc_feature (31)..(31): n stands for inosine
uugaaugccugaugaggccguuaggccgaangguccaa

SEQ ID NO: 3872 - RNA, 38 nt, Artificial Sequence
  Description of Artificial Sequence:  Enzymatic Nucleic Acid
  misc_feature (31)..(31): n stands for inosine
gcuuugaacugaugaggccguuaggccgaancaggguc

SEQ ID NO: 3873 - RNA, 38 nt, Artificial Sequence
  Description of Artificial Sequence:  Enzymatic Nucleic Acid
  misc_feature (31)..(31): n stands for inosine
guuggcuucugaugaggccguuaggccgaanaaugcag

SEQ ID NO: 3874 - RNA, 38 nt, Artificial Sequence
  Description of Artificial Sequence:  Enzymatic Nucleic Acid
  misc_feature (31)..(31): n stands for inosine
acugaguucugaugaggccguuaggccgaancuuugaa

SEQ ID NO: 3875 - RNA, 38 nt, Artificial Sequence
  Description of Artificial Sequence:  Enzymatic Nucleic Acid
  misc_feature (31)..(31): n stands for inosine
uacugagucugaugaggccguuaggccgaangcuuuga

SEQ ID NO: 3876 - RNA, 38 nt, Artificial Sequence
  Description of Artificial Sequence:  Enzymatic Nucleic Acid
  misc_feature (31)..(31): n stands for inosine
auuuacugcugaugaggccguuaggccgaanuuggcuu

SEQ ID NO: 3877 - RNA, 38 nt, Artificial Sequence
  Description of Artificial Sequence:  Enzymatic Nucleic Acid
  misc_feature (31)..(31): n stands for inosine
ggauuuaccugaugaggccguuaggccgaanaguuggc

SEQ ID NO: 3878 - RNA, 38 nt, Artificial Sequence
  Description of Artificial Sequence:  Enzymatic Nucleic Acid
  misc_feature (31)..(31): n stands for inosine
cccaaucucugaugaggccguuaggccgaanauuuacu

SEQ ID NO: 3879 - RNA, 38 nt, Artificial Sequence
  Description of Artificial Sequence:  Enzymatic Nucleic Acid
  misc_feature (31)..(31): n stands for inosine
ucccaauccugaugaggccguuaggccgaangauuuac

SEQ ID NO: 3880 - RNA, 38 nt, Artificial Sequence
  Description of Artificial Sequence:  Enzymatic Nucleic Acid
  misc_feature (31)..(31): n stands for inosine
cggguugacugaugaggccguuaggccgaanucccaau

SEQ ID NO: 3881 - RNA, 38 nt, Artificial Sequence
  Description of Artificial Sequence:  Enzymatic Nucleic Acid
  misc_feature (31)..(31): n stands for inosine
gcggguugcugaugaggccguuaggccgaangucccaa

SEQ ID NO: 3882 - RNA, 38 nt, Artificial Sequence
  Description of Artificial Sequence:  Enzymatic Nucleic Acid
  misc_feature (31)..(31): n stands for inosine
gugcgggucugaugaggccguuaggccgaanagguccc

SEQ ID NO: 3883 - RNA, 38 nt, Artificial Sequence
  Description of Artificial Sequence:  Enzymatic Nucleic Acid
  misc_feature (31)..(31): n stands for inosine
cuugugcgcugaugaggccguuaggccgaanuugaggu

SEQ ID NO: 3884 - RNA, 38 nt, Artificial Sequence
  Description of Artificial Sequence:  Enzymatic Nucleic Acid
  misc_feature (31)..(31): n stands for inosine
ccuugugccugaugaggccguuaggccgaanguugagg

SEQ ID NO: 3885 - RNA, 38 nt, Artificial Sequence
  Description of Artificial Sequence:  Enzymatic Nucleic Acid
  misc_feature (31)..(31): n stands for inosine
uguccuugcugaugaggccguuaggccgaancggguug

SEQ ID NO: 3886 - RNA, 38 nt, Artificial Sequence
  Description of Artificial Sequence:  Enzymatic Nucleic Acid
  misc_feature (31)..(31): n stands for inosine
guuguccucugaugaggccguuaggccgaanugcgggu

SEQ ID NO: 3887 - RNA, 38 nt, Artificial Sequence
  Description of Artificial Sequence:  Enzymatic Nucleic Acid
  misc_feature (31)..(31): n stands for inosine
cggccagucugaugaggccguuaggccgaanuccuugu

SEQ ID NO: 3888 - RNA, 38 nt, Artificial Sequence
  Description of Artificial Sequence:  Enzymatic Nucleic Acid
  misc_feature (31)..(31): n stands for inosine
guccggcccugaugaggccguuaggccgaanuuguccu

SEQ ID NO: 3889 - RNA, 38 nt, Artificial Sequence
  Description of Artificial Sequence:  Enzymatic Nucleic Acid
  misc_feature (31)..(31): n stands for inosine
uggcgucccugaugaggccguuaggccgaanccaguug

SEQ ID NO: 3890 - RNA, 38 nt, Artificial Sequence
  Description of Artificial Sequence:  Enzymatic Nucleic Acid
  misc_feature (31)..(31): n stands for inosine
accuuguucugaugaggccguuaggccgaancguccgg

SEQ ID NO: 3891 - RNA, 38 nt, Artificial Sequence
  Description of Artificial Sequence:  Enzymatic Nucleic Acid
  misc_feature (31)..(31): n stands for inosine
caccuugucugaugaggccguuaggccgaangcguccg

SEQ ID NO: 3892 - RNA, 38 nt, Artificial Sequence
  Description of Artificial Sequence:  Enzymatic Nucleic Acid
  misc_feature (31)..(31): n stands for inosine
ucccaccucugaugaggccguuaggccgaanuuggcgu

SEQ ID NO: 3893 - RNA, 38 nt, Artificial Sequence
  Description of Artificial Sequence:  Enzymatic Nucleic Acid
  misc_feature (31)..(31): n stands for inosine
ggcccgaacugaugaggccguuaggccgaancucccac

SEQ ID NO: 3894 - RNA, 38 nt, Artificial Sequence
  Description of Artificial Sequence:  Enzymatic Nucleic Acid
  misc_feature (31)..(31): n stands for inosine
ugaacccucugaugaggccguuaggccgaancccgaau

SEQ ID NO: 3895 - RNA, 38 nt, Artificial Sequence
  Description of Artificial Sequence:  Enzymatic Nucleic Acid
  misc_feature (31)..(31): n stands for inosine
gugaaccccugaugaggccguuaggccgaangcccgaa

SEQ ID NO: 3896 - RNA, 38 nt, Artificial Sequence
  Description of Artificial Sequence:  Enzymatic Nucleic Acid
  misc_feature (31)..(31): n stands for inosine
gggaggggcugaugaggccguuaggccgaanaacccug

SEQ ID NO: 3897 - RNA, 38 nt, Artificial Sequence
  Description of Artificial Sequence:  Enzymatic Nucleic Acid
  misc_feature (31)..(31): n stands for inosine
uggggaggcugaugaggccguuaggccgaanugaaccc

SEQ ID NO: 3898 - RNA, 38 nt, Artificial Sequence
  Description of Artificial Sequence:  Enzymatic Nucleic Acid
  misc_feature (31)..(31): n stands for inosine
auggggagcugaugaggccguuaggccgaangugaacc

SEQ ID NO: 3899 - RNA, 38 nt, Artificial Sequence
  Description of Artificial Sequence:  Enzymatic Nucleic Acid
  misc_feature (31)..(31): n stands for inosine
cauggggacugaugaggccguuaggccgaanggugaac

SEQ ID NO: 3900 - RNA, 38 nt, Artificial Sequence
  Description of Artificial Sequence:  Enzymatic Nucleic Acid
  misc_feature (31)..(31): n stands for inosine
ccauggggcugaugaggccguuaggccgaangggugaa

SEQ ID NO: 3901 - RNA, 38 nt, Artificial Sequence
  Description of Artificial Sequence:  Enzymatic Nucleic Acid
  misc_feature (31)..(31): n stands for inosine
ccccauggcugaugaggccguuaggccgaanaggggug

SEQ ID NO: 3902 - RNA, 38 nt, Artificial Sequence
  Description of Artificial Sequence:  Enzymatic Nucleic Acid
  misc_feature (31)..(31): n stands for inosine
cccccaugcugaugaggccguuaggccgaangaggggu

SEQ ID NO: 3903 - RNA, 38 nt, Artificial Sequence
  Description of Artificial Sequence:  Enzymatic Nucleic Acid
  misc_feature (31)..(31): n stands for inosine
ucccccaucugaugaggccguuaggccgaanggagggg

SEQ ID NO: 3904 - RNA, 38 nt, Artificial Sequence
  Description of Artificial Sequence:  Enzymatic Nucleic Acid
  misc_feature (31)..(31): n stands for inosine
gucccccacugaugaggccguuaggccgaangggaggg

SEQ ID NO: 3905 - RNA, 38 nt, Artificial Sequence
  Description of Artificial Sequence:  Enzymatic Nucleic Acid
  misc_feature (31)..(31): n stands for inosine
accccaaccugaugaggccguuaggccgaanuccccca

SEQ ID NO: 3906 - RNA, 38 nt, Artificial Sequence
  Description of Artificial Sequence:  Enzymatic Nucleic Acid
  misc_feature (31)..(31): n stands for inosine
agcgugagcugaugaggccguuaggccgaancuccacc

SEQ ID NO: 3907 - RNA, 38 nt, Artificial Sequence
  Description of Artificial Sequence:  Enzymatic Nucleic Acid
  misc_feature (31)..(31): n stands for inosine
gagcgugacugaugaggccguuaggccgaangcuccac

SEQ ID NO: 3908 - RNA, 38 nt, Artificial Sequence
  Description of Artificial Sequence:  Enzymatic Nucleic Acid
  misc_feature (31)..(31): n stands for inosine
ugagcgugcugaugaggccguuaggccgaanggcucca

SEQ ID NO: 3909 - RNA, 38 nt, Artificial Sequence
  Description of Artificial Sequence:  Enzymatic Nucleic Acid
  misc_feature (31)..(31): n stands for inosine
ccugagcgcugaugaggccguuaggccgaanagggcuc

SEQ ID NO: 3910 - RNA, 38 nt, Artificial Sequence
  Description of Artificial Sequence:  Enzymatic Nucleic Acid
  misc_feature (31)..(31): n stands for inosine
aggcccugcugaugaggccguuaggccgaancgugagg

SEQ ID NO: 3911 - RNA, 38 nt, Artificial Sequence
  Description of Artificial Sequence:  Enzymatic Nucleic Acid
  misc_feature (31)..(31): n stands for inosine
guaggccccugaugaggccguuaggccgaanagcguga

SEQ ID NO: 3912 - RNA, 38 nt, Artificial Sequence
  Description of Artificial Sequence:  Enzymatic Nucleic Acid
  misc_feature (31)..(31): n stands for inosine
ugugaguacugaugaggccguuaggccgaancccugag

SEQ ID NO: 3913 - RNA, 38 nt, Artificial Sequence
  Description of Artificial Sequence:  Enzymatic Nucleic Acid
  misc_feature (31)..(31): n stands for inosine
uugugagucugaugaggccguuaggccgaangcccuga

SEQ ID NO: 3914 - RNA, 38 nt, Artificial Sequence
  Description of Artificial Sequence:  Enzymatic Nucleic Acid
  misc_feature (31)..(31): n stands for inosine
caguugugcugaugaggccguuaggccgaanuaggccc

SEQ ID NO: 3915 - RNA, 38 nt, Artificial Sequence
  Description of Artificial Sequence:  Enzymatic Nucleic Acid
  misc_feature (31)..(31): n stands for inosine
cacaguugcugaugaggccguuaggccgaanaguaggc

SEQ ID NO: 3916 - RNA, 38 nt, Artificial Sequence
  Description of Artificial Sequence:  Enzymatic Nucleic Acid
  misc_feature (31)..(31): n stands for inosine
ggcacagucugaugaggccguuaggccgaanugaguag

SEQ ID NO: 3917 - RNA, 38 nt, Artificial Sequence
  Description of Artificial Sequence:  Enzymatic Nucleic Acid
  misc_feature (31)..(31): n stands for inosine
gcuggcaccugaugaggccguuaggccgaanuugugag

SEQ ID NO: 3918 - RNA, 38 nt, Artificial Sequence
  Description of Artificial Sequence:  Enzymatic Nucleic Acid
  misc_feature (31)..(31): n stands for inosine
gagcugcucugaugaggccguuaggccgaancacaguu

SEQ ID NO: 3919 - RNA, 38 nt, Artificial Sequence
  Description of Artificial Sequence:  Enzymatic Nucleic Acid
  misc_feature (31)..(31): n stands for inosine
ggagcugccugaugaggccguuaggccgaangcacagu

SEQ ID NO: 3920 - RNA, 38 nt, Artificial Sequence
  Description of Artificial Sequence:  Enzymatic Nucleic Acid
  misc_feature (31)..(31): n stands for inosine
ggaggagccugaugaggccguuaggccgaancuggcac

SEQ ID NO: 3921 - RNA, 38 nt, Artificial Sequence
  Description of Artificial Sequence:  Enzymatic Nucleic Acid
  misc_feature (31)..(31): n stands for inosine
ggaggaggcugaugaggccguuaggccgaancugcugg

SEQ ID NO: 3922 - RNA, 38 nt, Artificial Sequence
  Description of Artificial Sequence:  Enzymatic Nucleic Acid
  misc_feature (31)..(31): n stands for inosine
caggaggacugaugaggccguuaggccgaanagcugcu

SEQ ID NO: 3923 - RNA, 38 nt, Artificial Sequence
  Description of Artificial Sequence:  Enzymatic Nucleic Acid
  misc_feature (31)..(31): n stands for inosine
gcaggaggcugaugaggccguuaggccgaangagcugc

SEQ ID NO: 3924 - RNA, 38 nt, Artificial Sequence
  Description of Artificial Sequence:  Enzymatic Nucleic Acid
  misc_feature (31)..(31): n stands for inosine
aggcaggacugaugaggccguuaggccgaanaggagcu

SEQ ID NO: 3925 - RNA, 38 nt, Artificial Sequence
  Description of Artificial Sequence:  Enzymatic Nucleic Acid
  misc_feature (31)..(31): n stands for inosine
gaggcaggcugaugaggccguuaggccgaangaggagc

SEQ ID NO: 3926 - RNA, 38 nt, Artificial Sequence
  Description of Artificial Sequence:  Enzymatic Nucleic Acid
  misc_feature (31)..(31): n stands for inosine
uggaggcacugaugaggccguuaggccgaanaggagga

SEQ ID NO: 3927 - RNA, 38 nt, Artificial Sequence
  Description of Artificial Sequence:  Enzymatic Nucleic Acid
  misc_feature (31)..(31): n stands for inosine
guggaggccugaugaggccguuaggccgaangaggagg

SEQ ID NO: 3928 - RNA, 38 nt, Artificial Sequence
  Description of Artificial Sequence:  Enzymatic Nucleic Acid
  misc_feature (31)..(31): n stands for inosine
uugguggacugaugaggccguuaggccgaancaggagg

SEQ ID NO: 3929 - RNA, 38 nt, Artificial Sequence
  Description of Artificial Sequence:  Enzymatic Nucleic Acid
  misc_feature (31)..(31): n stands for inosine
auugguggcugaugaggccguuaggccgaangcaggag

SEQ ID NO: 3930 - RNA, 38 nt, Artificial Sequence
  Description of Artificial Sequence:  Enzymatic Nucleic Acid
  misc_feature (31)..(31): n stands for inosine
cgauuggucugaugaggccguuaggccgaanaggcagg

SEQ ID NO: 3931 - RNA, 38 nt, Artificial Sequence
  Description of Artificial Sequence:  Enzymatic Nucleic Acid
  misc_feature (31)..(31): n stands for inosine
ccgauuggcugaugaggccguuaggccgaangaggcag

SEQ ID NO: 3932 - RNA, 38 nt, Artificial Sequence
  Description of Artificial Sequence:  Enzymatic Nucleic Acid
  misc_feature (31)..(31): n stands for inosine
ugccgauucugaugaggccguuaggccgaanuggaggc

SEQ ID NO: 3933 - RNA, 38 nt, Artificial Sequence
  Description of Artificial Sequence:  Enzymatic Nucleic Acid
  misc_feature (31)..(31): n stands for inosine
cugccgaucugaugaggccguuaggccgaanguggagg

SEQ ID NO: 3934 - RNA, 38 nt, Artificial Sequence
  Description of Artificial Sequence:  Enzymatic Nucleic Acid
  misc_feature (31)..(31): n stands for inosine
uuccugaccugaugaggccguuaggccgaanccgauug

SEQ ID NO: 3935 - RNA, 38 nt, Artificial Sequence
  Description of Artificial Sequence:  Enzymatic Nucleic Acid
  misc_feature (31)..(31): n stands for inosine
ugccuucccugaugaggccguuaggccgaanacugccg

SEQ ID NO: 3936 - RNA, 38 nt, Artificial Sequence
  Description of Artificial Sequence:  Enzymatic Nucleic Acid
  misc_feature (31)..(31): n stands for inosine
gaguaggccugaugaggccguuaggccgaanccuuccu

SEQ ID NO: 3937 - RNA, 38 nt, Artificial Sequence
  Description of Artificial Sequence:  Enzymatic Nucleic Acid
  misc_feature (31)..(31): n stands for inosine
agggaguacugaugaggccguuaggccgaancugccuu

SEQ ID NO: 3938 - RNA, 38 nt, Artificial Sequence
  Description of Artificial Sequence:  Enzymatic Nucleic Acid
  misc_feature (31)..(31): n stands for inosine
aagggagucugaugaggccguuaggccgaangcugccu

SEQ ID NO: 3939 - RNA, 38 nt, Artificial Sequence
  Description of Artificial Sequence:  Enzymatic Nucleic Acid
  misc_feature (31)..(31): n stands for inosine
gauaagggcugaugaggccguuaggccgaanuaggcug

SEQ ID NO: 3940 - RNA, 38 nt, Artificial Sequence
  Description of Artificial Sequence:  Enzymatic Nucleic Acid
  misc_feature (31)..(31): n stands for inosine
gagauaagcugaugaggccguuaggccgaanaguaggc

SEQ ID NO: 3941 - RNA, 38 nt, Artificial Sequence
  Description of Artificial Sequence:  Enzymatic Nucleic Acid
  misc_feature (31)..(31): n stands for inosine
ggagauaacugaugaggccguuaggccgaangaguagg

SEQ ID NO: 3942 - RNA, 38 nt, Artificial Sequence
  Description of Artificial Sequence:  Enzymatic Nucleic Acid
  misc_feature (31)..(31): n stands for inosine
uggagauacugaugaggccguuaggccgaanggaguag

SEQ ID NO: 3943 - RNA, 38 nt, Artificial Sequence
  Description of Artificial Sequence:  Enzymatic Nucleic Acid
  misc_feature (31)..(31): n stands for inosine
agagguggcugaugaggccguuaggccgaanauaaggg

SEQ ID NO: 3944 - RNA, 38 nt, Artificial Sequence
  Description of Artificial Sequence:  Enzymatic Nucleic Acid
  misc_feature (31)..(31): n stands for inosine
uuagaggucugaugaggccguuaggccgaanagauaag

SEQ ID NO: 3945 - RNA, 38 nt, Artificial Sequence
  Description of Artificial Sequence:  Enzymatic Nucleic Acid
  misc_feature (31)..(31): n stands for inosine
cuuagaggcugaugaggccguuaggccgaangagauaa

SEQ ID NO: 3946 - RNA, 38 nt, Artificial Sequence
  Description of Artificial Sequence:  Enzymatic Nucleic Acid
  misc_feature (31)..(31): n stands for inosine
cccuuagacugaugaggccguuaggccgaanuggagau

SEQ ID NO: 3947 - RNA, 38 nt, Artificial Sequence
  Description of Artificial Sequence:  Enzymatic Nucleic Acid
  misc_feature (31)..(31): n stands for inosine
ucccuuagcugaugaggccguuaggccgaanguggaga

SEQ ID NO: 3948 - RNA, 38 nt, Artificial Sequence
  Description of Artificial Sequence:  Enzymatic Nucleic Acid
  misc_feature (31)..(31): n stands for inosine
ugucccuucugaugaggccguuaggccgaanaggugga

SEQ ID NO: 3949 - RNA, 38 nt, Artificial Sequence
  Description of Artificial Sequence:  Enzymatic Nucleic Acid
  misc_feature (31)..(31): n stands for inosine
aggaugagcugaugaggccguuaggccgaanucccuua

SEQ ID NO: 3950 - RNA, 38 nt, Artificial Sequence
  Description of Artificial Sequence:  Enzymatic Nucleic Acid
  misc_feature (31)..(31): n stands for inosine
ugaggaugcugaugaggccguuaggccgaanugucccu

SEQ ID NO: 3951 - RNA, 38 nt, Artificial Sequence
  Description of Artificial Sequence:  Enzymatic Nucleic Acid
  misc_feature (31)..(31): n stands for inosine
ccugaggacugaugaggccguuaggccgaanagugucc

SEQ ID NO: 3952 - RNA, 38 nt, Artificial Sequence
  Description of Artificial Sequence:  Enzymatic Nucleic Acid
  misc_feature (31)..(31): n stands for inosine
uggccugacugaugaggccguuaggccgaanaugagug

SEQ ID NO: 3953 - RNA, 38 nt, Artificial Sequence
  Description of Artificial Sequence:  Enzymatic Nucleic Acid
  misc_feature (31)..(31): n stands for inosine
auggccugcugaugaggccguuaggccgaangaugagu

SEQ ID NO: 3954 - RNA, 38 nt, Artificial Sequence
  Description of Artificial Sequence:  Enzymatic Nucleic Acid
  misc_feature (31)..(31): n stands for inosine
gcauggcccugaugaggccguuaggccgaanaggauga

SEQ ID NO: 3955 - RNA, 38 nt, Artificial Sequence
  Description of Artificial Sequence:  Enzymatic Nucleic Acid
  misc_feature (31)..(31): n stands for inosine
cacugcaucugaugaggccguuaggccgaanccugagg

SEQ ID NO: 3956 - RNA, 38 nt, Artificial Sequence
  Description of Artificial Sequence:  Enzymatic Nucleic Acid
  misc_feature (31)..(31): n stands for inosine
ccacugcacugaugaggccguuaggccgaangccugag

SEQ ID NO: 3957 - RNA, 37 nt, Artificial Sequence
  Description of Artificial Sequence:  Enzymatic Nucleic Acid
gccaccagugauggcaugcacuaugcgcgaggaaagu

SEQ ID NO: 3958 - RNA, 37 nt, Artificial Sequence
  Description of Artificial Sequence:  Enzymatic Nucleic Acid
gcagggcuugauggcaugcacuaugcgcgacuguucc

SEQ ID NO: 3959 - RNA, 37 nt, Artificial Sequence
  Description of Artificial Sequence:  Enzymatic Nucleic Acid
auucugagugauggcaugcacuaugcgcgagggcuca

SEQ ID NO: 3960 - RNA, 37 nt, Artificial Sequence
  Description of Artificial Sequence:  Enzymatic Nucleic Acid
cgauauggugauggcaugcacuaugcgcgagagacag

SEQ ID NO: 3961 - RNA, 37 nt, Artificial Sequence
  Description of Artificial Sequence:  Enzymatic Nucleic Acid
ccagucuuugauggcaugcacuaugcgcggauaagau

SEQ ID NO: 3962 - RNA, 37 nt, Artificial Sequence
  Description of Artificial Sequence:  Enzymatic Nucleic Acid
uccauguuugauggcaugcacuaugcgcggguacagg

SEQ ID NO: 3963 - RNA, 37 nt, Artificial Sequence
  Description of Artificial Sequence:  Enzymatic Nucleic Acid
uccugaugugauggcaugcacuaugcgcggauguucu

SEQ ID NO: 3964 - RNA, 37 nt, Artificial Sequence
  Description of Artificial Sequence:  Enzymatic Nucleic Acid
aacacgagugauggcaugcacuaugcgcgaggggucc

SEQ ID NO: 3965 - RNA, 37 nt, Artificial Sequence
  Description of Artificial Sequence:  Enzymatic Nucleic Acid
auuuuuguugauggcaugcacuaugcgcgaacaagaa

SEQ ID NO: 3966 - RNA, 37 nt, Artificial Sequence
  Description of Artificial Sequence:  Enzymatic Nucleic Acid
ugggacugugauggcaugcacuaugcgcggaauuuug

SEQ ID NO: 3967 - RNA, 37 nt, Artificial Sequence
  Description of Artificial Sequence:  Enzymatic Nucleic Acid
acauccagugauggcaugcacuaugcgcggauaacca

SEQ ID NO: 3968 - RNA, 37 nt, Artificial Sequence
  Description of Artificial Sequence:  Enzymatic Nucleic Acid
aaacgccgugauggcaugcacuaugcgcgagacacau

SEQ ID NO: 3969 - RNA, 37 nt, Artificial Sequence
  Description of Artificial Sequence:  Enzymatic Nucleic Acid
gcaggaugugauggcaugcacuaugcgcgagaggaag

SEQ ID NO: 3970 - RNA, 37 nt, Artificial Sequence
  Description of Artificial Sequence:  Enzymatic Nucleic Acid
cauagcagugauggcaugcacuaugcgcgaggaugca

SEQ ID NO: 3971 - RNA, 37 nt, Artificial Sequence
  Description of Artificial Sequence:  Enzymatic Nucleic Acid
aggcauagugauggcaugcacuaugcgcgagcaggau

SEQ ID NO: 3972 - RNA, 37 nt, Artificial Sequence
  Description of Artificial Sequence:  Enzymatic Nucleic Acid
agaugaggugauggcaugcacuaugcgcgauagcagc

SEQ ID NO: 3973 - RNA, 37 nt, Artificial Sequence
  Description of Artificial Sequence:  Enzymatic Nucleic Acid
caaacgggugauggcaugcacuaugcgcgaacauacc

SEQ ID NO: 3974 - RNA, 37 nt, Artificial Sequence
  Description of Artificial Sequence:  Enzymatic Nucleic Acid
agguuuugugauggcaugcacuaugcgcgaugguccg

SEQ ID NO: 3975 - RNA, 37 nt, Artificial Sequence
  Description of Artificial Sequence:  Enzymatic Nucleic Acid
gaguugugugauggcaugcacuaugcgcgagguuuug

SEQ ID NO: 3976 - RNA, 37 nt, Artificial Sequence
  Description of Artificial Sequence:  Enzymatic Nucleic Acid
uccuugagugauggcaugcacuaugcgcgaggaguug

SEQ ID NO: 3977 - RNA, 37 nt, Artificial Sequence
  Description of Artificial Sequence:  Enzymatic Nucleic Acid
uuguacagugauggcaugcacuaugcgcgaacaugag

SEQ ID NO: 3978 - RNA, 37 nt, Artificial Sequence
  Description of Artificial Sequence:  Enzymatic Nucleic Acid
uacaggugugauggcaugcacuaugcgcgaguuuccg

SEQ ID NO: 3979 - RNA, 37 nt, Artificial Sequence
  Description of Artificial Sequence:  Enzymatic Nucleic Acid
guauuuugugauggcaugcacuaugcgcggaaagccc

SEQ ID NO: 3980 - RNA, 37 nt, Artificial Sequence
  Description of Artificial Sequence:  Enzymatic Nucleic Acid
acaaauggugauggcaugcacuaugcgcgacuaguaa

SEQ ID NO: 3981 - RNA, 37 nt, Artificial Sequence
  Description of Artificial Sequence:  Enzymatic Nucleic Acid
aaccacauugauggcaugcacuaugcgcgauccauau

SEQ ID NO: 3982 - RNA, 37 nt, Artificial Sequence
  Description of Artificial Sequence:  Enzymatic Nucleic Acid
aagggacuugauggcaugcacuaugcgcgaagauguu

SEQ ID NO: 3983 - RNA, 37 nt, Artificial Sequence
  Description of Artificial Sequence:  Enzymatic Nucleic Acid
aacagcggugauggcaugcacuaugcgcgauaaaggg

SEQ ID NO: 3984 - RNA, 37 nt, Artificial Sequence
  Description of Artificial Sequence:  Enzymatic Nucleic Acid
gguaacagugauggcaugcacuaugcgcgggcauaaa

SEQ ID NO: 3985 - RNA, 37 nt, Artificial Sequence
  Description of Artificial Sequence:  Enzymatic Nucleic Acid
uccuguggugauggcaugcacuaugcgcgaaugugcc

SEQ ID NO: 3986 - RNA, 37 nt, Artificial Sequence
  Description of Artificial Sequence:  Enzymatic Nucleic Acid
uuuccaauugauggcaugcacuaugcgcgaauaggcc

SEQ ID NO: 3987 - RNA, 37 nt, Artificial Sequence
  Description of Artificial Sequence:  Enzymatic Nucleic Acid
ccacaauuugauggcaugcacuaugcgcgguugacau

SEQ ID NO: 3988 - RNA, 37 nt, Artificial Sequence
  Description of Artificial Sequence:  Enzymatic Nucleic Acid
aggggcggugauggcaugcacuaugcgcgaaacccca

SEQ ID NO: 3989 - RNA, 37 nt, Artificial Sequence
  Description of Artificial Sequence:  Enzymatic Nucleic Acid
gaaaggggugauggcaugcacuaugcgcgggcaaacc

SEQ ID NO: 3990 - RNA, 37 nt, Artificial Sequence
  Description of Artificial Sequence:  Enzymatic Nucleic Acid
ccacauugugauggcaugcacuaugcgcggugaaagg

SEQ ID NO: 3991 - RNA, 37 nt, Artificial Sequence
  Description of Artificial Sequence:  Enzymatic Nucleic Acid
cauuaaagugauggcaugcacuaugcgcgagaauauc

SEQ ID NO: 3992 - RNA, 37 nt, Artificial Sequence
  Description of Artificial Sequence:  Enzymatic Nucleic Acid
uauaaaggugauggcaugcacuaugcgcgauuaaagc

SEQ ID NO: 3993 - RNA, 37 nt, Artificial Sequence
  Description of Artificial Sequence:  Enzymatic Nucleic Acid
uaugcaugugauggcaugcacuaugcgcgauauaaag

SEQ ID NO: 3994 - RNA, 37 nt, Artificial Sequence
  Description of Artificial Sequence:  Enzymatic Nucleic Acid
cuuguaugugauggcaugcacuaugcgcgaugcauau

SEQ ID NO: 3995 - RNA, 37 nt, Artificial Sequence
  Description of Artificial Sequence:  Enzymatic Nucleic Acid
uaaguuggugauggcaugcacuaugcgcggagaaagu

SEQ ID NO: 3996 - RNA, 37 nt, Artificial Sequence
  Description of Artificial Sequence:  Enzymatic Nucleic Acid
uaaagguuugauggcaugcacuaugcgcgacauacug

SEQ ID NO: 3997 - RNA, 37 nt, Artificial Sequence
  Description of Artificial Sequence:  Enzymatic Nucleic Acid
uugccgagugauggcaugcacuaugcgcgaacggggu

SEQ ID NO: 3998 - RNA, 37 nt, Artificial Sequence
  Description of Artificial Sequence:  Enzymatic Nucleic Acid
acacuuggugauggcaugcacuaugcgcgauagacca

SEQ ID NO: 3999 - RNA, 37 nt, Artificial Sequence
  Description of Artificial Sequence:  Enzymatic Nucleic Acid
ugcgucagugauggcaugcacuaugcgcgaaacacuu

SEQ ID NO: 4000 - RNA, 37 nt, Artificial Sequence
  Description of Artificial Sequence:  Enzymatic Nucleic Acid
gguugcguugauggcaugcacuaugcgcgagcaaaca

SEQ ID NO: 4001 - RNA, 37 nt, Artificial Sequence
  Description of Artificial Sequence:  Enzymatic Nucleic Acid
ggggguugugauggcaugcacuaugcgcggucagcaa

SEQ ID NO: 4002 - RNA, 37 nt, Artificial Sequence
  Description of Artificial Sequence:  Enzymatic Nucleic Acid
cacgcaugugauggcaugcacuaugcgcggcugaugg

SEQ ID NO: 4003 - RNA, 37 nt, Artificial Sequence
  Description of Artificial Sequence:  Enzymatic Nucleic Acid
guuccacgugauggcaugcacuaugcgcgaugcgcug

SEQ ID NO: 4004 - RNA, 37 nt, Artificial Sequence
  Description of Artificial Sequence:  Enzymatic Nucleic Acid
uggaucggugauggcaugcacuaugcgcgagaggaga

SEQ ID NO: 4005 - RNA, 37 nt, Artificial Sequence
  Description of Artificial Sequence:  Enzymatic Nucleic Acid
guauggauugauggcaugcacuaugcgcgggcagagg

SEQ ID NO: 4006 - RNA, 37 nt, Artificial Sequence
  Description of Artificial Sequence:  Enzymatic Nucleic Acid
gaguuccgugauggcaugcacuaugcgcggguaugga

SEQ ID NO: 4007 - RNA, 37 nt, Artificial Sequence
  Description of Artificial Sequence:  Enzymatic Nucleic Acid
aaaacaagugauggcaugcacuaugcgcgggcuagga

SEQ ID NO: 4008 - RNA, 37 nt, Artificial Sequence
  Description of Artificial Sequence:  Enzymatic Nucleic Acid
gcugcgagugauggcaugcacuaugcgcgaaaacaag

SEQ ID NO: 4009 - RNA, 37 nt, Artificial Sequence
  Description of Artificial Sequence:  Enzymatic Nucleic Acid
accugcugugauggcaugcacuaugcgcggagcaaaa

SEQ ID NO: 4010 - RNA, 37 nt, Artificial Sequence
  Description of Artificial Sequence:  Enzymatic Nucleic Acid
agaauuguugauggcaugcacuaugcgcgagucccga

SEQ ID NO: 4011 - RNA, 37 nt, Artificial Sequence
  Description of Artificial Sequence:  Enzymatic Nucleic Acid
cgggagagugauggcaugcacuaugcgcgacgacaga

SEQ ID NO: 4012 - RNA, 37 nt, Artificial Sequence
  Description of Artificial Sequence:  Enzymatic Nucleic Acid
uauauuugugauggcaugcacuaugcgcggggagagc

SEQ ID NO: 4013 - RNA, 37 nt, Artificial Sequence
  Description of Artificial Sequence:  Enzymatic Nucleic Acid
cagccuagugauggcaugcacuaugcgcgagccaugg

SEQ ID NO: 4014 - RNA, 37 nt, Artificial Sequence
  Description of Artificial Sequence:  Enzymatic Nucleic Acid
guuggcagugauggcaugcacuaugcgcgacagccua

SEQ ID NO: 4015 - RNA, 37 nt, Artificial Sequence
  Description of Artificial Sequence:  Enzymatic Nucleic Acid
ccaguuggugauggcaugcacuaugcgcgagcacagc

SEQ ID NO: 4016 - RNA, 37 nt, Artificial Sequence
  Description of Artificial Sequence:  Enzymatic Nucleic Acid
acgucccgugauggcaugcacuaugcgcgguaggauc

SEQ ID NO: 4017 - RNA, 37 nt, Artificial Sequence
  Description of Artificial Sequence:  Enzymatic Nucleic Acid
ggauucagugauggcaugcacuaugcgcggccgacgg

SEQ ID NO: 4018 - RNA, 37 nt, Artificial Sequence
  Description of Artificial Sequence:  Enzymatic Nucleic Acid
gcgggauuugauggcaugcacuaugcgcgagcgccga

SEQ ID NO: 4019 - RNA, 37 nt, Artificial Sequence
  Description of Artificial Sequence:  Enzymatic Nucleic Acid
gucguccgugauggcaugcacuaugcgcggggauuca

SEQ ID NO: 4020 - RNA, 37 nt, Artificial Sequence
  Description of Artificial Sequence:  Enzymatic Nucleic Acid
ggagggguugauggcaugcacuaugcgcgguccgcgg

SEQ ID NO: 4021 - RNA, 37 nt, Artificial Sequence
  Description of Artificial Sequence:  Enzymatic Nucleic Acid
gccccaagugauggcaugcacuaugcgcgggccccgg

SEQ ID NO: 4022 - RNA, 37 nt, Artificial Sequence
  Description of Artificial Sequence:  Enzymatic Nucleic Acid
gaagcgggugauggcaugcacuaugcgcggguagagc

SEQ ID NO: 4023 - RNA, 37 nt, Artificial Sequence
  Description of Artificial Sequence:  Enzymatic Nucleic Acid
cggagaagugauggcaugcacuaugcgcggggcggua

SEQ ID NO: 4024 - RNA, 37 nt, Artificial Sequence
  Description of Artificial Sequence:  Enzymatic Nucleic Acid
acaauaggugauggcaugcacuaugcgcgggagaagc

SEQ ID NO: 4025 - RNA, 37 nt, Artificial Sequence
  Description of Artificial Sequence:  Enzymatic Nucleic Acid
uggacgguugauggcaugcacuaugcgcggguacaau

SEQ ID NO: 4026 - RNA, 37 nt, Artificial Sequence
  Description of Artificial Sequence:  Enzymatic Nucleic Acid
gagaggugugauggcaugcacuaugcgcggccccgug

SEQ ID NO: 4027 - RNA, 37 nt, Artificial Sequence
  Description of Artificial Sequence:  Enzymatic Nucleic Acid
ggaguccgugauggcaugcacuaugcgcgguaaagag

SEQ ID NO: 4028 - RNA, 37 nt, Artificial Sequence
  Description of Artificial Sequence:  Enzymatic Nucleic Acid
ugagaaggugauggcaugcacuaugcgcgacagacgg

SEQ ID NO: 4029 - RNA, 37 nt, Artificial Sequence
  Description of Artificial Sequence:  Enzymatic Nucleic Acid
cgguccggugauggcaugcacuaugcgcgagaugaga

SEQ ID NO: 4030 - RNA, 37 nt, Artificial Sequence
  Description of Artificial Sequence:  Enzymatic Nucleic Acid
gcgaagugugauggcaugcacuaugcgcgacacgguc

SEQ ID NO: 4031 - RNA, 37 nt, Artificial Sequence
  Description of Artificial Sequence:  Enzymatic Nucleic Acid
aggugaagugauggcaugcacuaugcgcggaagugca

SEQ ID NO: 4032 - RNA, 37 nt, Artificial Sequence
  Description of Artificial Sequence:  Enzymatic Nucleic Acid
gcgacgugugauggcaugcacuaugcgcgagagguga

SEQ ID NO: 4033 - RNA, 37 nt, Artificial Sequence
  Description of Artificial Sequence:  Enzymatic Nucleic Acid
ucuccaugugauggcaugcacuaugcgcggacgugca

SEQ ID NO: 4034 - RNA, 37 nt, Artificial Sequence
  Description of Artificial Sequence:  Enzymatic Nucleic Acid
ugggcguuugauggcaugcacuaugcgcgacgguggu

SEQ ID NO: 4035 - RNA, 37 nt, Artificial Sequence
  Description of Artificial Sequence:  Enzymatic Nucleic Acid
ccugugggugauggcaugcacuaugcgcgguucacgg

SEQ ID NO: 4036 - RNA, 37 nt, Artificial Sequence
  Description of Artificial Sequence:  Enzymatic Nucleic Acid
accuugggugauggcaugcacuaugcgcgagguuccu

SEQ ID NO: 4037 - RNA, 37 nt, Artificial Sequence
  Description of Artificial Sequence:  Enzymatic Nucleic Acid
cucuuaugugauggcaugcacuaugcgcgaagaccuu

SEQ ID NO: 4038 - RNA, 37 nt, Artificial Sequence
  Description of Artificial Sequence:  Enzymatic Nucleic Acid
aggucgguugauggcaugcacuaugcgcgguugacau

SEQ ID NO: 4039 - RNA, 37 nt, Artificial Sequence
  Description of Artificial Sequence:  Enzymatic Nucleic Acid
cucaagguugauggcaugcacuaugcgcgggucguug

SEQ ID NO: 4040 - RNA, 37 nt, Artificial Sequence
  Description of Artificial Sequence:  Enzymatic Nucleic Acid
guaugccuugauggcaugcacuaugcgcgaaggucgg

SEQ ID NO: 4041 - RNA, 37 nt, Artificial Sequence
  Description of Artificial Sequence:  Enzymatic Nucleic Acid
cucccacuugauggcaugcacuaugcgcgauuaaaca

SEQ ID NO: 4042 - RNA, 37 nt, Artificial Sequence
  Description of Artificial Sequence:  Enzymatic Nucleic Acid
aaaaguugugauggcaugcacuaugcgcgauggugcu

SEQ ID NO: 4043 - RNA, 37 nt, Artificial Sequence
  Description of Artificial Sequence:  Enzymatic Nucleic Acid
ugauuaggugauggcaugcacuaugcgcgagagguga

SEQ ID NO: 4044 - RNA, 37 nt, Artificial Sequence
  Description of Artificial Sequence:  Enzymatic Nucleic Acid
acccaaggugauggcaugcacuaugcgcgacagcuug

SEQ ID NO: 4045 - RNA, 37 nt, Artificial Sequence
  Description of Artificial Sequence:  Enzymatic Nucleic Acid
auacggguugauggcaugcacuaugcgcgaaugucca

SEQ ID NO: 4046 - RNA, 37 nt, Artificial Sequence
  Description of Artificial Sequence:  Enzymatic Nucleic Acid
ucagaaggugauggcaugcacuaugcgcgaaaaaaga

SEQ ID NO: 4047 - RNA, 37 nt, Artificial Sequence
  Description of Artificial Sequence:  Enzymatic Nucleic Acid
aaagaaguugauggcaugcacuaugcgcgagaaggca

SEQ ID NO: 4048 - RNA, 37 nt, Artificial Sequence
  Description of Artificial Sequence:  Enzymatic Nucleic Acid
ggagaucuugauggcaugcacuaugcgcggaauagaa

SEQ ID NO: 4049 - RNA, 37 nt, Artificial Sequence
  Description of Artificial Sequence:  Enzymatic Nucleic Acid
ggcgguguugauggcaugcacuaugcgcggaggagau

SEQ ID NO: 4050 - RNA, 37 nt, Artificial Sequence
  Description of Artificial Sequence:  Enzymatic Nucleic Acid
agcagaggugauggcaugcacuaugcgcgggugucga

SEQ ID NO: 4051 - RNA, 37 nt, Artificial Sequence
  Description of Artificial Sequence:  Enzymatic Nucleic Acid
auacagagugauggcaugcacuaugcgcgagaggcgg

SEQ ID NO: 4052 - RNA, 37 nt, Artificial Sequence
  Description of Artificial Sequence:  Enzymatic Nucleic Acid
caucaacuugauggcaugcacuaugcgcgaccccaac

SEQ ID NO: 4053 - RNA, 37 nt, Artificial Sequence
  Description of Artificial Sequence:  Enzymatic Nucleic Acid
agauucauugauggcaugcacuaugcgcgaacucacc

SEQ ID NO: 4054 - RNA, 37 nt, Artificial Sequence
  Description of Artificial Sequence:  Enzymatic Nucleic Acid
gcuagauuugauggcaugcacuaugcgcgaucaacuc

SEQ ID NO: 4055 - RNA, 37 nt, Artificial Sequence
  Description of Artificial Sequence:  Enzymatic Nucleic Acid
caguuucuugauggcaugcacuaugcgcggcccaaaa

SEQ ID NO: 4056 - RNA, 37 nt, Artificial Sequence
  Description of Artificial Sequence:  Enzymatic Nucleic Acid
caaauauuugauggcaugcacuaugcgcgaagaacag

SEQ ID NO: 4057 - RNA, 37 nt, Artificial Sequence
  Description of Artificial Sequence:  Enzymatic Nucleic Acid
gaggagugugauggcaugcacuaugcgcggaauccac

SEQ ID NO: 4058 - RNA, 37 nt, Artificial Sequence
  Description of Artificial Sequence:  Enzymatic Nucleic Acid
ucuauaugugauggcaugcacuaugcgcgaggaggag

SEQ ID NO: 4059 - RNA, 37 nt, Artificial Sequence
  Description of Artificial Sequence:  Enzymatic Nucleic Acid
gauaggggugauggcaugcacuaugcgcgauuuggug

SEQ ID NO: 4060 - RNA, 37 nt, Artificial Sequence
  Description of Artificial Sequence:  Enzymatic Nucleic Acid
ugccucuuugauggcaugcacuaugcgcggucuaaca

SEQ ID NO: 4061 - RNA, 37 nt, Artificial Sequence
  Description of Artificial Sequence:  Enzymatic Nucleic Acid
cugcgaggugauggcaugcacuaugcgcggagggagu

SEQ ID NO: 4062 - RNA, 37 nt, Artificial Sequence
  Description of Artificial Sequence:  Enzymatic Nucleic Acid
uucgucugugauggcaugcacuaugcgcggaggcgag

SEQ ID NO: 4063 - RNA, 37 nt, Artificial Sequence
  Description of Artificial Sequence:  Enzymatic Nucleic Acid
gagaccuuugauggcaugcacuaugcgcggucugcga

SEQ ID NO: 4064 - RNA, 37 nt, Artificial Sequence
  Description of Artificial Sequence:  Enzymatic Nucleic Acid
cgacgcggugauggcaugcacuaugcgcggauugaga

SEQ ID NO: 4065 - RNA, 37 nt, Artificial Sequence
  Description of Artificial Sequence:  Enzymatic Nucleic Acid
cugcgacgugauggcaugcacuaugcgcgggcgauug

SEQ ID NO: 4066 - RNA, 37 nt, Artificial Sequence
  Description of Artificial Sequence:  Enzymatic Nucleic Acid
aucuucugugauggcaugcacuaugcgcggacgcggc

SEQ ID NO: 4067 - RNA, 37 nt, Artificial Sequence
  Description of Artificial Sequence:  Enzymatic Nucleic Acid
gauuaaagugauggcaugcacuaugcgcgaagguacc

SEQ ID NO: 4068 - RNA, 37 nt, Artificial Sequence
  Description of Artificial Sequence:  Enzymatic Nucleic Acid
augaauguugauggcaugcacuaugcgcgaggaaaag

SEQ ID NO: 4069 - RNA, 37 nt, Artificial Sequence
  Description of Artificial Sequence:  Enzymatic Nucleic Acid
uccuccugugauggcaugcacuaugcgcgaaaugaau

SEQ ID NO: 4070 - RNA, 37 nt, Artificial Sequence
  Description of Artificial Sequence:  Enzymatic Nucleic Acid
acaucuauugauggcaugcacuaugcgcgaacaaugu

SEQ ID NO: 4071 - RNA, 37 nt, Artificial Sequence
  Description of Artificial Sequence:  Enzymatic Nucleic Acid
ccuguuuuugauggcaugcacuaugcgcgauuuacug

SEQ ID NO: 4072 - RNA, 37 nt, Artificial Sequence
  Description of Artificial Sequence:  Enzymatic Nucleic Acid
cuagcaggugauggcaugcacuaugcgcgauaguuaa

SEQ ID NO: 4073 - RNA, 37 nt, Artificial Sequence
  Description of Artificial Sequence:  Enzymatic Nucleic Acid
aaaccuagugauggcaugcacuaugcgcgaggcauag

SEQ ID NO: 4074 - RNA, 37 nt, Artificial Sequence
  Description of Artificial Sequence:  Enzymatic Nucleic Acid
ucuaagggugauggcaugcacuaugcgcgaaauauuu

SEQ ID NO: 4075 - RNA, 37 nt, Artificial Sequence
  Description of Artificial Sequence:  Enzymatic Nucleic Acid
uaaugucgugauggcaugcacuaugcgcggucuggaa

SEQ ID NO: 4076 - RNA, 37 nt, Artificial Sequence
  Description of Artificial Sequence:  Enzymatic Nucleic Acid
aauaauguugauggcaugcacuaugcgcggcgucugg

SEQ ID NO: 4077 - RNA, 37 nt, Artificial Sequence
  Description of Artificial Sequence:  Enzymatic Nucleic Acid
aaaugaggugauggcaugcacuaugcgcggcuacgug

SEQ ID NO: 4078 - RNA, 37 nt, Artificial Sequence
  Description of Artificial Sequence:  Enzymatic Nucleic Acid
gugacccgugauggcaugcacuaugcgcgaaaaugag

SEQ ID NO: 4079 - RNA, 37 nt, Artificial Sequence
  Description of Artificial Sequence:  Enzymatic Nucleic Acid
ugccuuuuugauggcaugcacuaugcgcggagguuug

SEQ ID NO: 4080 - RNA, 37 nt, Artificial Sequence
  Description of Artificial Sequence:  Enzymatic Nucleic Acid
cugaugauugauggcaugcacuaugcgcgggggaaga

SEQ ID NO: 4081 - RNA, 37 nt, Artificial Sequence
  Description of Artificial Sequence:  Enzymatic Nucleic Acid
uuugaaugugauggcaugcacuaugcgcgagggucca

SEQ ID NO: 4082 - RNA, 37 nt, Artificial Sequence
  Description of Artificial Sequence:  Enzymatic Nucleic Acid
uccuugugugauggcaugcacuaugcgcgggguugag

SEQ ID NO: 4083 - RNA, 37 nt, Artificial Sequence
  Description of Artificial Sequence:  Enzymatic Nucleic Acid
cuuguuggugauggcaugcacuaugcgcgguccggcc

SEQ ID NO: 4084 - RNA, 37 nt, Artificial Sequence
  Description of Artificial Sequence:  Enzymatic Nucleic Acid
gcccugagugauggcaugcacuaugcgcggugagggc

SEQ ID NO: 4085 - RNA, 37 nt, Artificial Sequence
  Description of Artificial Sequence:  Enzymatic Nucleic Acid
gcugcuggugauggcaugcacuaugcgcgacaguugu

SEQ ID NO: 4086 - RNA, 37 nt, Artificial Sequence
  Description of Artificial Sequence:  Enzymatic Nucleic Acid
gguggaggugauggcaugcacuaugcgcgaggaggag

SEQ ID NO: 4087 - RNA, 37 nt, Artificial Sequence
  Description of Artificial Sequence:  Enzymatic Nucleic Acid
ggaaaguaugauggcaugcacuaugcgcgagggcccu

SEQ ID NO: 4088 - RNA, 37 nt, Artificial Sequence
  Description of Artificial Sequence:  Enzymatic Nucleic Acid
ggcagagaugauggcaugcacuaugcgcgaguauucu

SEQ ID NO: 4089 - RNA, 37 nt, Artificial Sequence
  Description of Artificial Sequence:  Enzymatic Nucleic Acid
guucgguaugauggcaugcacuaugcgcgaggguccc

SEQ ID NO: 4090 - RNA, 37 nt, Artificial Sequence
  Description of Artificial Sequence:  Enzymatic Nucleic Acid
gccuguaaugauggcaugcacuaugcgcgacgagcag

SEQ ID NO: 4091 - RNA, 37 nt, Artificial Sequence
  Description of Artificial Sequence:  Enzymatic Nucleic Acid
uuugucaaugauggcaugcacuaugcgcgaagaaaaa

SEQ ID NO: 4092 - RNA, 37 nt, Artificial Sequence
  Description of Artificial Sequence:  Enzymatic Nucleic Acid
ccaagacaugauggcaugcacuaugcgcgacgggugu

SEQ ID NO: 4093 - RNA, 37 nt, Artificial Sequence
  Description of Artificial Sequence:  Enzymatic Nucleic Acid
ggccaagaugauggcaugcacuaugcgcgacacgggu

SEQ ID NO: 4094 - RNA, 37 nt, Artificial Sequence
  Description of Artificial Sequence:  Enzymatic Nucleic Acid
gaggacaaugauggcaugcacuaugcgcgagguuggu

SEQ ID NO: 4095 - RNA, 37 nt, Artificial Sequence
  Description of Artificial Sequence:  Enzymatic Nucleic Acid
uuggaggaugauggcaugcacuaugcgcgaacagguu

SEQ ID NO: 4096 - RNA, 37 nt, Artificial Sequence
  Description of Artificial Sequence:  Enzymatic Nucleic Acid
aaccaggaugauggcaugcacuaugcgcgaaauugga

SEQ ID NO: 4097 - RNA, 37 nt, Artificial Sequence
  Description of Artificial Sequence:  Enzymatic Nucleic Acid
cgcagacaugauggcaugcacuaugcgcgauccagcg

SEQ ID NO: 4098 - RNA, 37 nt, Artificial Sequence
  Description of Artificial Sequence:  Enzymatic Nucleic Acid
gccgcagaugauggcaugcacuaugcgcgacauccag

SEQ ID NO: 4099 - RNA, 37 nt, Artificial Sequence
  Description of Artificial Sequence:  Enzymatic Nucleic Acid
agaaccaaugauggcaugcacuaugcgcgaagaagau

SEQ ID NO: 4100 - RNA, 37 nt, Artificial Sequence
  Description of Artificial Sequence:  Enzymatic Nucleic Acid
acgggcaaugauggcaugcacuaugcgcgauaccuug

SEQ ID NO: 4101 - RNA, 37 nt, Artificial Sequence
  Description of Artificial Sequence:  Enzymatic Nucleic Acid
uuagaggaugauggcaugcacuaugcgcgaaacgggc

SEQ ID NO: 4102 - RNA, 37 nt, Artificial Sequence
  Description of Artificial Sequence:  Enzymatic Nucleic Acid
gagggaaaugauggcaugcacuaugcgcgauagaggu

SEQ ID NO: 4103 - RNA, 37 nt, Artificial Sequence
  Description of Artificial Sequence:  Enzymatic Nucleic Acid
uacagcaaugauggcaugcacuaugcgcgaugaggga

SEQ ID NO: 4104 - RNA, 37 nt, Artificial Sequence
  Description of Artificial Sequence:  Enzymatic Nucleic Acid
guuuuguaugauggcaugcacuaugcgcgagcaacau

SEQ ID NO: 4105 - RNA, 37 nt, Artificial Sequence
  Description of Artificial Sequence:  Enzymatic Nucleic Acid
ugggaauaugauggcaugcacuaugcgcgaggugcag

SEQ ID NO: 4106 - RNA, 37 nt, Artificial Sequence
  Description of Artificial Sequence:  Enzymatic Nucleic Acid
ccacugaaugauggcaugcacuaugcgcgaaauggca

SEQ ID NO: 4107 - RNA, 37 nt, Artificial Sequence
  Description of Artificial Sequence:  Enzymatic Nucleic Acid
aagccagaugauggcaugcacuaugcgcgaguggggg

SEQ ID NO: 4108 - RNA, 37 nt, Artificial Sequence
  Description of Artificial Sequence:  Enzymatic Nucleic Acid
caaaaccaugauggcaugcacuaugcgcgaucaucca

SEQ ID NO: 4109 - RNA, 37 nt, Artificial Sequence
  Description of Artificial Sequence:  Enzymatic Nucleic Acid
auguuguaugauggcaugcacuaugcgcgagacuugg

SEQ ID NO: 4110 - RNA, 37 nt, Artificial Sequence
  Description of Artificial Sequence:  Enzymatic Nucleic Acid
auugguaaugauggcaugcacuaugcgcgagcggcau

SEQ ID NO: 4111 - RNA, 37 nt, Artificial Sequence
  Description of Artificial Sequence:  Enzymatic Nucleic Acid
cccaaagaugauggcaugcacuaugcgcgaaaagaaa

SEQ ID NO: 4112 - RNA, 37 nt, Artificial Sequence
  Description of Artificial Sequence:  Enzymatic Nucleic Acid
cccaauuaugauggcaugcacuaugcgcgauauccca

SEQ ID NO: 4113 - RNA, 37 nt, Artificial Sequence
  Description of Artificial Sequence:  Enzymatic Nucleic Acid
uuuuuguaugauggcaugcacuaugcgcgaauauguu

SEQ ID NO: 4114 - RNA, 37 nt, Artificial Sequence
  Description of Artificial Sequence:  Enzymatic Nucleic Acid
cuaaaacaugauggcaugcacuaugcgcgauuuugau

SEQ ID NO: 4115 - RNA, 37 nt, Artificial Sequence
  Description of Artificial Sequence:  Enzymatic Nucleic Acid
uccuaaaaugauggcaugcacuaugcgcgacauuuug

SEQ ID NO: 4116 - RNA, 37 nt, Artificial Sequence
  Description of Artificial Sequence:  Enzymatic Nucleic Acid
ccuguuuaugauggcaugcacuaugcgcgaggaaguu

SEQ ID NO: 4117 - RNA, 37 nt, Artificial Sequence
  Description of Artificial Sequence:  Enzymatic Nucleic Acid
uucguugaugauggcaugcacuaugcgcgauacuuuc

SEQ ID NO: 4118 - RNA, 37 nt, Artificial Sequence
  Description of Artificial Sequence:  Enzymatic Nucleic Acid
aagacccaugauggcaugcacuaugcgcgaauucguu

SEQ ID NO: 4119 - RNA, 37 nt, Artificial Sequence
  Description of Artificial Sequence:  Enzymatic Nucleic Acid
aauauccaugauggcaugcacuaugcgcgauugcgug

SEQ ID NO: 4120 - RNA, 37 nt, Artificial Sequence
  Description of Artificial Sequence:  Enzymatic Nucleic Acid
aagguucaugauggcaugcacuaugcgcgauacuguu

SEQ ID NO: 4121 - RNA, 37 nt, Artificial Sequence
  Description of Artificial Sequence:  Enzymatic Nucleic Acid
ucagcaaaugauggcaugcacuaugcgcgacuuggca

SEQ ID NO: 4122 - RNA, 37 nt, Artificial Sequence
  Description of Artificial Sequence:  Enzymatic Nucleic Acid
aggagacaugauggcaugcacuaugcgcgaaagguuc

SEQ ID NO: 4123 - RNA, 37 nt, Artificial Sequence
  Description of Artificial Sequence:  Enzymatic Nucleic Acid
agaggagaugauggcaugcacuaugcgcgacaaaggu

SEQ ID NO: 4124 - RNA, 37 nt, Artificial Sequence
  Description of Artificial Sequence:  Enzymatic Nucleic Acid
gagcaaaaugauggcaugcacuaugcgcgaagcggcu

SEQ ID NO: 4125 - RNA, 37 nt, Artificial Sequence
  Description of Artificial Sequence:  Enzymatic Nucleic Acid
gagcacgaugauggcaugcacuaugcgcgagaauugu

SEQ ID NO: 4126 - RNA, 37 nt, Artificial Sequence
  Description of Artificial Sequence:  Enzymatic Nucleic Acid
uggcagcaugauggcaugcacuaugcgcgagccuagc

SEQ ID NO: 4127 - RNA, 37 nt, Artificial Sequence
  Description of Artificial Sequence:  Enzymatic Nucleic Acid
gacguaaaugauggcaugcacuaugcgcgaaaggacg

SEQ ID NO: 4128 - RNA, 37 nt, Artificial Sequence
  Description of Artificial Sequence:  Enzymatic Nucleic Acid
ggucgguaugauggcaugcacuaugcgcgaauaggcg

SEQ ID NO: 4129 - RNA, 37 nt, Artificial Sequence
  Description of Artificial Sequence:  Enzymatic Nucleic Acid
agaaggcaugauggcaugcacuaugcgcgagacgggg

SEQ ID NO: 4130 - RNA, 37 nt, Artificial Sequence
  Description of Artificial Sequence:  Enzymatic Nucleic Acid
gaagugcaugauggcaugcacuaugcgcgacgguccg

SEQ ID NO: 4131 - RNA, 37 nt, Artificial Sequence
  Description of Artificial Sequence:  Enzymatic Nucleic Acid
gucguugaugauggcaugcacuaugcgcgauugcuga

SEQ ID NO: 4132 - RNA, 37 nt, Artificial Sequence
  Description of Artificial Sequence:  Enzymatic Nucleic Acid
uaaacacaugauggcaugcacuaugcgcgagucuuug

SEQ ID NO: 4133 - RNA, 37 nt, Artificial Sequence
  Description of Artificial Sequence:  Enzymatic Nucleic Acid
auuaaacaugauggcaugcacuaugcgcgacagucuu

SEQ ID NO: 4134 - RNA, 37 nt, Artificial Sequence
  Description of Artificial Sequence:  Enzymatic Nucleic Acid
ucauuaaaugauggcaugcacuaugcgcgacacaguc

SEQ ID NO: 4135 - RNA, 37 nt, Artificial Sequence
  Description of Artificial Sequence:  Enzymatic Nucleic Acid
uccuaguaugauggcaugcacuaugcgcgaaagaccu

SEQ ID NO: 4136 - RNA, 37 nt, Artificial Sequence
  Description of Artificial Sequence:  Enzymatic Nucleic Acid
uaugccuaugauggcaugcacuaugcgcgagccuccu

SEQ ID NO: 4137 - RNA, 37 nt, Artificial Sequence
  Description of Artificial Sequence:  Enzymatic Nucleic Acid
ggugaacaugauggcaugcacuaugcgcgaccaauuu

SEQ ID NO: 4138 - RNA, 37 nt, Artificial Sequence
  Description of Artificial Sequence:  Enzymatic Nucleic Acid
cuggugaaugauggcaugcacuaugcgcgacaccaau

SEQ ID NO: 4139 - RNA, 37 nt, Artificial Sequence
  Description of Artificial Sequence:  Enzymatic Nucleic Acid
gacaugaaugauggcaugcacuaugcgcgaugagaug

SEQ ID NO: 4140 - RNA, 37 nt, Artificial Sequence
  Description of Artificial Sequence:  Enzymatic Nucleic Acid
caguaggaugauggcaugcacuaugcgcgaugaacau

SEQ ID NO: 4141 - RNA, 37 nt, Artificial Sequence
  Description of Artificial Sequence:  Enzymatic Nucleic Acid
ggcuugaaugauggcaugcacuaugcgcgaguaggac

SEQ ID NO: 4142 - RNA, 37 nt, Artificial Sequence
  Description of Artificial Sequence:  Enzymatic Nucleic Acid
ccaaggcaugauggcaugcacuaugcgcgagcuugga

SEQ ID NO: 4143 - RNA, 37 nt, Artificial Sequence
  Description of Artificial Sequence:  Enzymatic Nucleic Acid
uaacuccaugauggcaugcacuaugcgcgagaagcuc

SEQ ID NO: 4144 - RNA, 37 nt, Artificial Sequence
  Description of Artificial Sequence:  Enzymatic Nucleic Acid
ccccgauaugauggcaugcacuaugcgcgagagcaga

SEQ ID NO: 4145 - RNA, 37 nt, Artificial Sequence
  Description of Artificial Sequence:  Enzymatic Nucleic Acid
gaggugaaugauggcaugcacuaugcgcgaauguucc

SEQ ID NO: 4146 - RNA, 37 nt, Artificial Sequence
  Description of Artificial Sequence:  Enzymatic Nucleic Acid
ccccaacaugauggcaugcacuaugcgcgagaauagc

SEQ ID NO: 4147 - RNA, 37 nt, Artificial Sequence
  Description of Artificial Sequence:  Enzymatic Nucleic Acid
caccccaaugauggcaugcacuaugcgcgacagaaua

SEQ ID NO: 4148 - RNA, 37 nt, Artificial Sequence
  Description of Artificial Sequence:  Enzymatic Nucleic Acid
aacguugaugauggcaugcacuaugcgcgauagcuga

SEQ ID NO: 4149 - RNA, 37 nt, Artificial Sequence
  Description of Artificial Sequence:  Enzymatic Nucleic Acid
ugaaaccaugauggcaugcacuaugcgcgaauaguug

SEQ ID NO: 4150 - RNA, 37 nt, Artificial Sequence
  Description of Artificial Sequence:  Enzymatic Nucleic Acid
aaguaagaugauggcaugcacuaugcgcgaggaaaug

SEQ ID NO: 4151 - RNA, 37 nt, Artificial Sequence
  Description of Artificial Sequence:  Enzymatic Nucleic Acid
uucaagaaugauggcaugcacuaugcgcgaguuucuc

SEQ ID NO: 4152 - RNA, 37 nt, Artificial Sequence
  Description of Artificial Sequence:  Enzymatic Nucleic Acid
ccaaaagaugauggcaugcacuaugcgcgaccaaaua

SEQ ID NO: 4153 - RNA, 37 nt, Artificial Sequence
  Description of Artificial Sequence:  Enzymatic Nucleic Acid
cgaauccaugauggcaugcacuaugcgcgacuccaaa

SEQ ID NO: 4154 - RNA, 37 nt, Artificial Sequence
  Description of Artificial Sequence:  Enzymatic Nucleic Acid
ucuaacaaugauggcaugcacuaugcgcgaguaguuu

SEQ ID NO: 4155 - RNA, 37 nt, Artificial Sequence
  Description of Artificial Sequence:  Enzymatic Nucleic Acid
ucgucuaaugauggcaugcacuaugcgcgaacaguag

SEQ ID NO: 4156 - RNA, 37 nt, Artificial Sequence
  Description of Artificial Sequence:  Enzymatic Nucleic Acid
aauacuaaugauggcaugcacuaugcgcgauugagau

SEQ ID NO: 4157 - RNA, 37 nt, Artificial Sequence
  Description of Artificial Sequence:  Enzymatic Nucleic Acid
ucuaucaaugauggcaugcacuaugcgcgaauguccu

SEQ ID NO: 4158 - RNA, 37 nt, Artificial Sequence
  Description of Artificial Sequence:  Enzymatic Nucleic Acid
auugcuuaugauggcaugcacuaugcgcgaucuauca

SEQ ID NO: 4159 - RNA, 37 nt, Artificial Sequence
  Description of Artificial Sequence:  Enzymatic Nucleic Acid
gggccccaugauggcaugcacuaugcgcgaaauugcu

SEQ ID NO: 4160 - RNA, 37 nt, Artificial Sequence
  Description of Artificial Sequence:  Enzymatic Nucleic Acid
uuuaguaaugauggcaugcacuaugcgcgauugggau

SEQ ID NO: 4161 - RNA, 37 nt, Artificial Sequence
  Description of Artificial Sequence:  Enzymatic Nucleic Acid
auuaacuaugauggcaugcacuaugcgcgauacucug

SEQ ID NO: 4162 - RNA, 37 nt, Artificial Sequence
  Description of Artificial Sequence:  Enzymatic Nucleic Acid
auuggggaugauggcaugcacuaugcgcgagaaagau

SEQ ID NO: 4163 - RNA, 37 nt, Artificial Sequence
  Description of Artificial Sequence:  Enzymatic Nucleic Acid
caccccaaugauggcaugcacuaugcgcgaguccccc

SEQ ID NO: 4164 - RNA, 37 nt, Artificial Sequence
  Description of Artificial Sequence:  Enzymatic Nucleic Acid
ugcuggcaugauggcaugcacuaugcgcgaguuguga

SEQ ID NO: 4165 - RNA, 38 nt, Artificial Sequence
  Description of Artificial Sequence:  Enzymatic Nucleic Acid
  misc_feature (11)..(16): Phosphorothioate 3'-Internucleotide Linkage
  misc_feature (20)..(20): Phosphorothioate 3'-Internucleotide Linkage
  misc_feature (22)..(22): Phosphorothioate 3'-Internucleotide Linkage
  misc_feature (24)..(25): Phosphorothioate 3'-Internucleotide Linkage
  misc_feature (28)..(28): Phosphorothioate 3'-Internucleotide Linkage
  misc_feature (30)..(30): Phosphorothioate 3'-Internucleotide Linkage
gccaccaggccgaaaggcgagucaaggucuaggaaagu

SEQ ID NO: 4166 - RNA, 38 nt, Artificial Sequence
  Description of Artificial Sequence:  Enzymatic Nucleic Acid
  misc_feature (11)..(16): Phosphorothioate 3'-Internucleotide Linkage
  misc_feature (20)..(20): Phosphorothioate 3'-Internucleotide Linkage
  misc_feature (22)..(22): Phosphorothioate 3'-Internucleotide Linkage
  misc_feature (24)..(25): Phosphorothioate 3'-Internucleotide Linkage
  misc_feature (28)..(28): Phosphorothioate 3'-Internucleotide Linkage
  misc_feature (30)..(30): Phosphorothioate 3'-Internucleotide Linkage
auucugaggccgaaaggcgagucaaggucuagggcuca

SEQ ID NO: 4167 - RNA, 38 nt, Artificial Sequence
  Description of Artificial Sequence:  Enzymatic Nucleic Acid
  misc_feature (11)..(16): Phosphorothioate 3'-Internucleotide Linkage
  misc_feature (20)..(20): Phosphorothioate 3'-Internucleotide Linkage
  misc_feature (22)..(22): Phosphorothioate 3'-Internucleotide Linkage
  misc_feature (24)..(25): Phosphorothioate 3'-Internucleotide Linkage
  misc_feature (28)..(28): Phosphorothioate 3'-Internucleotide Linkage
  misc_feature (30)..(30): Phosphorothioate 3'-Internucleotide Linkage
cgauaugggccgaaaggcgagucaaggucuagagacag

SEQ ID NO: 4168 - RNA, 38 nt, Artificial Sequence
  Description of Artificial Sequence:  Enzymatic Nucleic Acid
  misc_feature (11)..(16): Phosphorothioate 3'-Internucleotide Linkage
  misc_feature (20)..(20): Phosphorothioate 3'-Internucleotide Linkage
  misc_feature (22)..(22): Phosphorothioate 3'-Internucleotide Linkage
  misc_feature (24)..(25): Phosphorothioate 3'-Internucleotide Linkage
  misc_feature (28)..(28): Phosphorothioate 3'-Internucleotide Linkage
  misc_feature (30)..(30): Phosphorothioate 3'-Internucleotide Linkage
uccugauggccgaaaggcgagucaaggucugauguucu

SEQ ID NO: 4169 - RNA, 38 nt, Artificial Sequence
  Description of Artificial Sequence:  Enzymatic Nucleic Acid
  misc_feature (11)..(16): Phosphorothioate 3'-Internucleotide Linkage
  misc_feature (20)..(20): Phosphorothioate 3'-Internucleotide Linkage
  misc_feature (22)..(22): Phosphorothioate 3'-Internucleotide Linkage
  misc_feature (24)..(25): Phosphorothioate 3'-Internucleotide Linkage
  misc_feature (28)..(28): Phosphorothioate 3'-Internucleotide Linkage
  misc_feature (30)..(30): Phosphorothioate 3'-Internucleotide Linkage
aacacgaggccgaaaggcgagucaaggucuaggggucc

SEQ ID NO: 4170 - RNA, 38 nt, Artificial Sequence
  Description of Artificial Sequence:  Enzymatic Nucleic Acid
  misc_feature (11)..(16): Phosphorothioate 3'-Internucleotide Linkage
  misc_feature (20)..(20): Phosphorothioate 3'-Internucleotide Linkage
  misc_feature (22)..(22): Phosphorothioate 3'-Internucleotide Linkage
  misc_feature (24)..(25): Phosphorothioate 3'-Internucleotide Linkage
  misc_feature (28)..(28): Phosphorothioate 3'-Internucleotide Linkage
  misc_feature (30)..(30): Phosphorothioate 3'-Internucleotide Linkage
ugggacuggccgaaaggcgagucaaggucugaauuuug

SEQ ID NO: 4171 - RNA, 38 nt, Artificial Sequence
  Description of Artificial Sequence:  Enzymatic Nucleic Acid
  misc_feature (11)..(16): Phosphorothioate 3'-Internucleotide Linkage
  misc_feature (20)..(20): Phosphorothioate 3'-Internucleotide Linkage
  misc_feature (22)..(22): Phosphorothioate 3'-Internucleotide Linkage
  misc_feature (24)..(25): Phosphorothioate 3'-Internucleotide Linkage
  misc_feature (28)..(28): Phosphorothioate 3'-Internucleotide Linkage
  misc_feature (30)..(30): Phosphorothioate 3'-Internucleotide Linkage
acauccaggccgaaaggcgagucaaggucugauaacca

SEQ ID NO: 4172 - RNA, 38 nt, Artificial Sequence
  Description of Artificial Sequence:  Enzymatic Nucleic Acid
  misc_feature (11)..(16): Phosphorothioate 3'-Internucleotide Linkage
  misc_feature (20)..(20): Phosphorothioate 3'-Internucleotide Linkage
  misc_feature (22)..(22): Phosphorothioate 3'-Internucleotide Linkage
  misc_feature (24)..(25): Phosphorothioate 3'-Internucleotide Linkage
  misc_feature (28)..(28): Phosphorothioate 3'-Internucleotide Linkage
  misc_feature (30)..(30): Phosphorothioate 3'-Internucleotide Linkage
aaacgccggccgaaaggcgagucaaggucuagacacau

SEQ ID NO: 4173 - RNA, 38 nt, Artificial Sequence
  Description of Artificial Sequence:  Enzymatic Nucleic Acid
  misc_feature (11)..(16): Phosphorothioate 3'-Internucleotide Linkage
  misc_feature (20)..(20): Phosphorothioate 3'-Internucleotide Linkage
  misc_feature (22)..(22): Phosphorothioate 3'-Internucleotide Linkage
  misc_feature (24)..(25): Phosphorothioate 3'-Internucleotide Linkage
  misc_feature (28)..(28): Phosphorothioate 3'-Internucleotide Linkage
  misc_feature (30)..(30): Phosphorothioate 3'-Internucleotide Linkage
gcaggauggccgaaaggcgagucaaggucuagaggaag

SEQ ID NO: 4174 - RNA, 38 nt, Artificial Sequence
  Description of Artificial Sequence:  Enzymatic Nucleic Acid
  misc_feature (11)..(16): Phosphorothioate 3'-Internucleotide Linkage
  misc_feature (20)..(20): Phosphorothioate 3'-Internucleotide Linkage
  misc_feature (22)..(22): Phosphorothioate 3'-Internucleotide Linkage
  misc_feature (24)..(25): Phosphorothioate 3'-Internucleotide Linkage
  misc_feature (28)..(28): Phosphorothioate 3'-Internucleotide Linkage
  misc_feature (30)..(30): Phosphorothioate 3'-Internucleotide Linkage
cauagcaggccgaaaggcgagucaaggucuaggaugca

SEQ ID NO: 4175 - RNA, 38 nt, Artificial Sequence
  Description of Artificial Sequence:  Enzymatic Nucleic Acid
  misc_feature (11)..(16): Phosphorothioate 3'-Internucleotide Linkage
  misc_feature (20)..(20): Phosphorothioate 3'-Internucleotide Linkage
  misc_feature (22)..(22): Phosphorothioate 3'-Internucleotide Linkage
  misc_feature (24)..(25): Phosphorothioate 3'-Internucleotide Linkage
  misc_feature (28)..(28): Phosphorothioate 3'-Internucleotide Linkage
  misc_feature (30)..(30): Phosphorothioate 3'-Internucleotide Linkage
aggcauaggccgaaaggcgagucaaggucuagcaggau

SEQ ID NO: 4176 - RNA, 38 nt, Artificial Sequence
  Description of Artificial Sequence:  Enzymatic Nucleic Acid
  misc_feature (11)..(16): Phosphorothioate 3'-Internucleotide Linkage
  misc_feature (20)..(20): Phosphorothioate 3'-Internucleotide Linkage
  misc_feature (22)..(22): Phosphorothioate 3'-Internucleotide Linkage
  misc_feature (24)..(25): Phosphorothioate 3'-Internucleotide Linkage
  misc_feature (28)..(28): Phosphorothioate 3'-Internucleotide Linkage
  misc_feature (30)..(30): Phosphorothioate 3'-Internucleotide Linkage
agaugagggccgaaaggcgagucaaggucuauagcagc

SEQ ID NO: 4177 - RNA, 38 nt, Artificial Sequence
  Description of Artificial Sequence:  Enzymatic Nucleic Acid
  misc_feature (11)..(16): Phosphorothioate 3'-Internucleotide Linkage
  misc_feature (20)..(20): Phosphorothioate 3'-Internucleotide Linkage
  misc_feature (22)..(22): Phosphorothioate 3'-Internucleotide Linkage
  misc_feature (24)..(25): Phosphorothioate 3'-Internucleotide Linkage
  misc_feature (28)..(28): Phosphorothioate 3'-Internucleotide Linkage
  misc_feature (30)..(30): Phosphorothioate 3'-Internucleotide Linkage
caaacggggccgaaaggcgagucaaggucuaacauacc

SEQ ID NO: 4178 - RNA, 38 nt, Artificial Sequence
  Description of Artificial Sequence:  Enzymatic Nucleic Acid
  misc_feature (11)..(16): Phosphorothioate 3'-Internucleotide Linkage
  misc_feature (20)..(20): Phosphorothioate 3'-Internucleotide Linkage
  misc_feature (22)..(22): Phosphorothioate 3'-Internucleotide Linkage
  misc_feature (24)..(25): Phosphorothioate 3'-Internucleotide Linkage
  misc_feature (28)..(28): Phosphorothioate 3'-Internucleotide Linkage
  misc_feature (30)..(30): Phosphorothioate 3'-Internucleotide Linkage
agguuuuggccgaaaggcgagucaaggucuaugguccg

SEQ ID NO: 4179 - RNA, 38 nt, Artificial Sequence
  Description of Artificial Sequence:  Enzymatic Nucleic Acid
  misc_feature (11)..(16): Phosphorothioate 3'-Internucleotide Linkage
  misc_feature (20)..(20): Phosphorothioate 3'-Internucleotide Linkage
  misc_feature (22)..(22): Phosphorothioate 3'-Internucleotide Linkage
  misc_feature (24)..(25): Phosphorothioate 3'-Internucleotide Linkage
  misc_feature (28)..(28): Phosphorothioate 3'-Internucleotide Linkage
  misc_feature (30)..(30): Phosphorothioate 3'-Internucleotide Linkage
gaguuguggccgaaaggcgagucaaggucuagguuuug

SEQ ID NO: 4180 - RNA, 38 nt, Artificial Sequence
  Description of Artificial Sequence:  Enzymatic Nucleic Acid
  misc_feature (11)..(16): Phosphorothioate 3'-Internucleotide Linkage
  misc_feature (20)..(20): Phosphorothioate 3'-Internucleotide Linkage
  misc_feature (22)..(22): Phosphorothioate 3'-Internucleotide Linkage
  misc_feature (24)..(25): Phosphorothioate 3'-Internucleotide Linkage
  misc_feature (28)..(28): Phosphorothioate 3'-Internucleotide Linkage
  misc_feature (30)..(30): Phosphorothioate 3'-Internucleotide Linkage
uccuugaggccgaaaggcgagucaaggucuaggaguug

SEQ ID NO: 4181 - RNA, 38 nt, Artificial Sequence
  Description of Artificial Sequence:  Enzymatic Nucleic Acid
  misc_feature (11)..(16): Phosphorothioate 3'-Internucleotide Linkage
  misc_feature (20)..(20): Phosphorothioate 3'-Internucleotide Linkage
  misc_feature (22)..(22): Phosphorothioate 3'-Internucleotide Linkage
  misc_feature (24)..(25): Phosphorothioate 3'-Internucleotide Linkage
  misc_feature (28)..(28): Phosphorothioate 3'-Internucleotide Linkage
  misc_feature (30)..(30): Phosphorothioate 3'-Internucleotide Linkage
uuguacaggccgaaaggcgagucaaggucuaacaugag

SEQ ID NO: 4182 - RNA, 38 nt, Artificial Sequence
  Description of Artificial Sequence:  Enzymatic Nucleic Acid
  misc_feature (11)..(16): Phosphorothioate 3'-Internucleotide Linkage
  misc_feature (20)..(20): Phosphorothioate 3'-Internucleotide Linkage
  misc_feature (22)..(22): Phosphorothioate 3'-Internucleotide Linkage
  misc_feature (24)..(25): Phosphorothioate 3'-Internucleotide Linkage
  misc_feature (28)..(28): Phosphorothioate 3'-Internucleotide Linkage
  misc_feature (30)..(30): Phosphorothioate 3'-Internucleotide Linkage
uacagguggccgaaaggcgagucaaggucuaguuuccg

SEQ ID NO: 4183 - RNA, 38 nt, Artificial Sequence
  Description of Artificial Sequence:  Enzymatic Nucleic Acid
  misc_feature (11)..(16): Phosphorothioate 3'-Internucleotide Linkage
  misc_feature (20)..(20): Phosphorothioate 3'-Internucleotide Linkage
  misc_feature (22)..(22): Phosphorothioate 3'-Internucleotide Linkage
  misc_feature (24)..(25): Phosphorothioate 3'-Internucleotide Linkage
  misc_feature (28)..(28): Phosphorothioate 3'-Internucleotide Linkage
  misc_feature (30)..(30): Phosphorothioate 3'-Internucleotide Linkage
guauuuuggccgaaaggcgagucaaggucugaaagccc

SEQ ID NO: 4184 - RNA, 38 nt, Artificial Sequence
  Description of Artificial Sequence:  Enzymatic Nucleic Acid
  misc_feature (11)..(16): Phosphorothioate 3'-Internucleotide Linkage
  misc_feature (20)..(20): Phosphorothioate 3'-Internucleotide Linkage
  misc_feature (22)..(22): Phosphorothioate 3'-Internucleotide Linkage
  misc_feature (24)..(25): Phosphorothioate 3'-Internucleotide Linkage
  misc_feature (28)..(28): Phosphorothioate 3'-Internucleotide Linkage
  misc_feature (30)..(30): Phosphorothioate 3'-Internucleotide Linkage
acaaaugggccgaaaggcgagucaaggucuacuaguaa

SEQ ID NO: 4185 - RNA, 38 nt, Artificial Sequence
  Description of Artificial Sequence:  Enzymatic Nucleic Acid
  misc_feature (11)..(16): Phosphorothioate 3'-Internucleotide Linkage
  misc_feature (20)..(20): Phosphorothioate 3'-Internucleotide Linkage
  misc_feature (22)..(22): Phosphorothioate 3'-Internucleotide Linkage
  misc_feature (24)..(25): Phosphorothioate 3'-Internucleotide Linkage
  misc_feature (28)..(28): Phosphorothioate 3'-Internucleotide Linkage
  misc_feature (30)..(30): Phosphorothioate 3'-Internucleotide Linkage
aacagcgggccgaaaggcgagucaaggucuauaaaggg

SEQ ID NO: 4186 - RNA, 38 nt, Artificial Sequence
  Description of Artificial Sequence:  Enzymatic Nucleic Acid
  misc_feature (11)..(16): Phosphorothioate 3'-Internucleotide Linkage
  misc_feature (20)..(20): Phosphorothioate 3'-Internucleotide Linkage
  misc_feature (22)..(22): Phosphorothioate 3'-Internucleotide Linkage
  misc_feature (24)..(25): Phosphorothioate 3'-Internucleotide Linkage
  misc_feature (28)..(28): Phosphorothioate 3'-Internucleotide Linkage
  misc_feature (30)..(30): Phosphorothioate 3'-Internucleotide Linkage
gguaacaggccgaaaggcgagucaaggucuggcauaaa

SEQ ID NO: 4187 - RNA, 38 nt, Artificial Sequence
  Description of Artificial Sequence:  Enzymatic Nucleic Acid
  misc_feature (11)..(16): Phosphorothioate 3'-Internucleotide Linkage
  misc_feature (20)..(20): Phosphorothioate 3'-Internucleotide Linkage
  misc_feature (22)..(22): Phosphorothioate 3'-Internucleotide Linkage
  misc_feature (24)..(25): Phosphorothioate 3'-Internucleotide Linkage
  misc_feature (28)..(28): Phosphorothioate 3'-Internucleotide Linkage
  misc_feature (30)..(30): Phosphorothioate 3'-Internucleotide Linkage
uccugugggccgaaaggcgagucaaggucuaaugugcc

SEQ ID NO: 4188 - RNA, 38 nt, Artificial Sequence
  Description of Artificial Sequence:  Enzymatic Nucleic Acid
  misc_feature (11)..(16): Phosphorothioate 3'-Internucleotide Linkage
  misc_feature (20)..(20): Phosphorothioate 3'-Internucleotide Linkage
  misc_feature (22)..(22): Phosphorothioate 3'-Internucleotide Linkage
  misc_feature (24)..(25): Phosphorothioate 3'-Internucleotide Linkage
  misc_feature (28)..(28): Phosphorothioate 3'-Internucleotide Linkage
  misc_feature (30)..(30): Phosphorothioate 3'-Internucleotide Linkage
aggggcgggccgaaaggcgagucaaggucuaaacccca

SEQ ID NO: 4189 - RNA, 38 nt, Artificial Sequence
  Description of Artificial Sequence:  Enzymatic Nucleic Acid
  misc_feature (11)..(16): Phosphorothioate 3'-Internucleotide Linkage
  misc_feature (20)..(20): Phosphorothioate 3'-Internucleotide Linkage
  misc_feature (22)..(22): Phosphorothioate 3'-Internucleotide Linkage
  misc_feature (24)..(25): Phosphorothioate 3'-Internucleotide Linkage
  misc_feature (28)..(28): Phosphorothioate 3'-Internucleotide Linkage
  misc_feature (30)..(30): Phosphorothioate 3'-Internucleotide Linkage
gaaagggggccgaaaggcgagucaaggucuggcaaacc

SEQ ID NO: 4190 - RNA, 38 nt, Artificial Sequence
  Description of Artificial Sequence:  Enzymatic Nucleic Acid
  misc_feature (11)..(16): Phosphorothioate 3'-Internucleotide Linkage
  misc_feature (20)..(20): Phosphorothioate 3'-Internucleotide Linkage
  misc_feature (22)..(22): Phosphorothioate 3'-Internucleotide Linkage
  misc_feature (24)..(25): Phosphorothioate 3'-Internucleotide Linkage
  misc_feature (28)..(28): Phosphorothioate 3'-Internucleotide Linkage
  misc_feature (30)..(30): Phosphorothioate 3'-Internucleotide Linkage
ccacauuggccgaaaggcgagucaaggucugugaaagg

SEQ ID NO: 4191 - RNA, 38 nt, Artificial Sequence
  Description of Artificial Sequence:  Enzymatic Nucleic Acid
  misc_feature (11)..(16): Phosphorothioate 3'-Internucleotide Linkage
  misc_feature (20)..(20): Phosphorothioate 3'-Internucleotide Linkage
  misc_feature (22)..(22): Phosphorothioate 3'-Internucleotide Linkage
  misc_feature (24)..(25): Phosphorothioate 3'-Internucleotide Linkage
  misc_feature (28)..(28): Phosphorothioate 3'-Internucleotide Linkage
  misc_feature (30)..(30): Phosphorothioate 3'-Internucleotide Linkage
cauuaaaggccgaaaggcgagucaaggucuagaauauc

SEQ ID NO: 4192 - RNA, 38 nt, Artificial Sequence
  Description of Artificial Sequence:  Enzymatic Nucleic Acid
  misc_feature (11)..(16): Phosphorothioate 3'-Internucleotide Linkage
  misc_feature (20)..(20): Phosphorothioate 3'-Internucleotide Linkage
  misc_feature (22)..(22): Phosphorothioate 3'-Internucleotide Linkage
  misc_feature (24)..(25): Phosphorothioate 3'-Internucleotide Linkage
  misc_feature (28)..(28): Phosphorothioate 3'-Internucleotide Linkage
  misc_feature (30)..(30): Phosphorothioate 3'-Internucleotide Linkage
uauaaagggccgaaaggcgagucaaggucuauuaaagc

SEQ ID NO: 4193 - RNA, 38 nt, Artificial Sequence
  Description of Artificial Sequence:  Enzymatic Nucleic Acid
  misc_feature (11)..(16): Phosphorothioate 3'-Internucleotide Linkage
  misc_feature (20)..(20): Phosphorothioate 3'-Internucleotide Linkage
  misc_feature (22)..(22): Phosphorothioate 3'-Internucleotide Linkage
  misc_feature (24)..(25): Phosphorothioate 3'-Internucleotide Linkage
  misc_feature (28)..(28): Phosphorothioate 3'-Internucleotide Linkage
  misc_feature (30)..(30): Phosphorothioate 3'-Internucleotide Linkage
uaugcauggccgaaaggcgagucaaggucuauauaaag

SEQ ID NO: 4194 - RNA, 38 nt, Artificial Sequence
  Description of Artificial Sequence:  Enzymatic Nucleic Acid
  misc_feature (11)..(16): Phosphorothioate 3'-Internucleotide Linkage
  misc_feature (20)..(20): Phosphorothioate 3'-Internucleotide Linkage
  misc_feature (22)..(22): Phosphorothioate 3'-Internucleotide Linkage
  misc_feature (24)..(25): Phosphorothioate 3'-Internucleotide Linkage
  misc_feature (28)..(28): Phosphorothioate 3'-Internucleotide Linkage
  misc_feature (30)..(30): Phosphorothioate 3'-Internucleotide Linkage
cuuguauggccgaaaggcgagucaaggucuaugcauau

SEQ ID NO: 4195 - RNA, 38 nt, Artificial Sequence
  Description of Artificial Sequence:  Enzymatic Nucleic Acid
  misc_feature (11)..(16): Phosphorothioate 3'-Internucleotide Linkage
  misc_feature (20)..(20): Phosphorothioate 3'-Internucleotide Linkage
  misc_feature (22)..(22): Phosphorothioate 3'-Internucleotide Linkage
  misc_feature (24)..(25): Phosphorothioate 3'-Internucleotide Linkage
  misc_feature (28)..(28): Phosphorothioate 3'-Internucleotide Linkage
  misc_feature (30)..(30): Phosphorothioate 3'-Internucleotide Linkage
uaaguugggccgaaaggcgagucaaggucugagaaagu

SEQ ID NO: 4196 - RNA, 38 nt, Artificial Sequence
  Description of Artificial Sequence:  Enzymatic Nucleic Acid
  misc_feature (11)..(16): Phosphorothioate 3'-Internucleotide Linkage
  misc_feature (20)..(20): Phosphorothioate 3'-Internucleotide Linkage
  misc_feature (22)..(22): Phosphorothioate 3'-Internucleotide Linkage
  misc_feature (24)..(25): Phosphorothioate 3'-Internucleotide Linkage
  misc_feature (28)..(28): Phosphorothioate 3'-Internucleotide Linkage
  misc_feature (30)..(30): Phosphorothioate 3'-Internucleotide Linkage
uugccgaggccgaaaggcgagucaaggucuaacggggu

SEQ ID NO: 4197 - RNA, 38 nt, Artificial Sequence
  Description of Artificial Sequence:  Enzymatic Nucleic Acid
  misc_feature (11)..(16): Phosphorothioate 3'-Internucleotide Linkage
  misc_feature (20)..(20): Phosphorothioate 3'-Internucleotide Linkage
  misc_feature (22)..(22): Phosphorothioate 3'-Internucleotide Linkage
  misc_feature (24)..(25): Phosphorothioate 3'-Internucleotide Linkage
  misc_feature (28)..(28): Phosphorothioate 3'-Internucleotide Linkage
  misc_feature (30)..(30): Phosphorothioate 3'-Internucleotide Linkage
acacuugggccgaaaggcgagucaaggucuauagacca

SEQ ID NO: 4198 - RNA, 38 nt, Artificial Sequence
  Description of Artificial Sequence:  Enzymatic Nucleic Acid
  misc_feature (11)..(16): Phosphorothioate 3'-Internucleotide Linkage
  misc_feature (20)..(20): Phosphorothioate 3'-Internucleotide Linkage
  misc_feature (22)..(22): Phosphorothioate 3'-Internucleotide Linkage
  misc_feature (24)..(25): Phosphorothioate 3'-Internucleotide Linkage
  misc_feature (28)..(28): Phosphorothioate 3'-Internucleotide Linkage
  misc_feature (30)..(30): Phosphorothioate 3'-Internucleotide Linkage
ugcgucaggccgaaaggcgagucaaggucuaaacacuu

SEQ ID NO: 4199 - RNA, 38 nt, Artificial Sequence
  Description of Artificial Sequence:  Enzymatic Nucleic Acid
  misc_feature (11)..(16): Phosphorothioate 3'-Internucleotide Linkage
  misc_feature (20)..(20): Phosphorothioate 3'-Internucleotide Linkage
  misc_feature (22)..(22): Phosphorothioate 3'-Internucleotide Linkage
  misc_feature (24)..(25): Phosphorothioate 3'-Internucleotide Linkage
  misc_feature (28)..(28): Phosphorothioate 3'-Internucleotide Linkage
  misc_feature (30)..(30): Phosphorothioate 3'-Internucleotide Linkage
ggggguuggccgaaaggcgagucaaggucugucagcaa

SEQ ID NO: 4200 - RNA, 38 nt, Artificial Sequence
  Description of Artificial Sequence:  Enzymatic Nucleic Acid
  misc_feature (11)..(16): Phosphorothioate 3'-Internucleotide Linkage
  misc_feature (20)..(20): Phosphorothioate 3'-Internucleotide Linkage
  misc_feature (22)..(22): Phosphorothioate 3'-Internucleotide Linkage
  misc_feature (24)..(25): Phosphorothioate 3'-Internucleotide Linkage
  misc_feature (28)..(28): Phosphorothioate 3'-Internucleotide Linkage
  misc_feature (30)..(30): Phosphorothioate 3'-Internucleotide Linkage
cacgcauggccgaaaggcgagucaaggucugcugaugg

SEQ ID NO: 4201 - RNA, 38 nt, Artificial Sequence
  Description of Artificial Sequence:  Enzymatic Nucleic Acid
  misc_feature (11)..(16): Phosphorothioate 3'-Internucleotide Linkage
  misc_feature (20)..(20): Phosphorothioate 3'-Internucleotide Linkage
  misc_feature (22)..(22): Phosphorothioate 3'-Internucleotide Linkage
  misc_feature (24)..(25): Phosphorothioate 3'-Internucleotide Linkage
  misc_feature (28)..(28): Phosphorothioate 3'-Internucleotide Linkage
  misc_feature (30)..(30): Phosphorothioate 3'-Internucleotide Linkage
guuccacggccgaaaggcgagucaaggucuaugcgcug

SEQ ID NO: 4202 - RNA, 38 nt, Artificial Sequence
  Description of Artificial Sequence:  Enzymatic Nucleic Acid
  misc_feature (11)..(16): Phosphorothioate 3'-Internucleotide Linkage
  misc_feature (20)..(20): Phosphorothioate 3'-Internucleotide Linkage
  misc_feature (22)..(22): Phosphorothioate 3'-Internucleotide Linkage
  misc_feature (24)..(25): Phosphorothioate 3'-Internucleotide Linkage
  misc_feature (28)..(28): Phosphorothioate 3'-Internucleotide Linkage
  misc_feature (30)..(30): Phosphorothioate 3'-Internucleotide Linkage
uggaucgggccgaaaggcgagucaaggucuagaggaga

SEQ ID NO: 4203 - RNA, 38 nt, Artificial Sequence
  Description of Artificial Sequence:  Enzymatic Nucleic Acid
  misc_feature (11)..(16): Phosphorothioate 3'-Internucleotide Linkage
  misc_feature (20)..(20): Phosphorothioate 3'-Internucleotide Linkage
  misc_feature (22)..(22): Phosphorothioate 3'-Internucleotide Linkage
  misc_feature (24)..(25): Phosphorothioate 3'-Internucleotide Linkage
  misc_feature (28)..(28): Phosphorothioate 3'-Internucleotide Linkage
  misc_feature (30)..(30): Phosphorothioate 3'-Internucleotide Linkage
gaguuccggccgaaaggcgagucaaggucugguaugga

SEQ ID NO: 4204 - RNA, 38 nt, Artificial Sequence
  Description of Artificial Sequence:  Enzymatic Nucleic Acid
  misc_feature (11)..(16): Phosphorothioate 3'-Internucleotide Linkage
  misc_feature (20)..(20): Phosphorothioate 3'-Internucleotide Linkage
  misc_feature (22)..(22): Phosphorothioate 3'-Internucleotide Linkage
  misc_feature (24)..(25): Phosphorothioate 3'-Internucleotide Linkage
  misc_feature (28)..(28): Phosphorothioate 3'-Internucleotide Linkage
  misc_feature (30)..(30): Phosphorothioate 3'-Internucleotide Linkage
aaaacaaggccgaaaggcgagucaaggucuggcuagga

SEQ ID NO: 4205 - RNA, 38 nt, Artificial Sequence
  Description of Artificial Sequence:  Enzymatic Nucleic Acid
  misc_feature (11)..(16): Phosphorothioate 3'-Internucleotide Linkage
  misc_feature (20)..(20): Phosphorothioate 3'-Internucleotide Linkage
  misc_feature (22)..(22): Phosphorothioate 3'-Internucleotide Linkage
  misc_feature (24)..(25): Phosphorothioate 3'-Internucleotide Linkage
  misc_feature (28)..(28): Phosphorothioate 3'-Internucleotide Linkage
  misc_feature (30)..(30): Phosphorothioate 3'-Internucleotide Linkage
gcugcgaggccgaaaggcgagucaaggucuaaaacaag

SEQ ID NO: 4206 - RNA, 38 nt, Artificial Sequence
  Description of Artificial Sequence:  Enzymatic Nucleic Acid
  misc_feature (11)..(16): Phosphorothioate 3'-Internucleotide Linkage
  misc_feature (20)..(20): Phosphorothioate 3'-Internucleotide Linkage
  misc_feature (22)..(22): Phosphorothioate 3'-Internucleotide Linkage
  misc_feature (24)..(25): Phosphorothioate 3'-Internucleotide Linkage
  misc_feature (28)..(28): Phosphorothioate 3'-Internucleotide Linkage
  misc_feature (30)..(30): Phosphorothioate 3'-Internucleotide Linkage
accugcuggccgaaaggcgagucaaggucugagcaaaa

SEQ ID NO: 4207 - RNA, 38 nt, Artificial Sequence
  Description of Artificial Sequence:  Enzymatic Nucleic Acid
  misc_feature (11)..(16): Phosphorothioate 3'-Internucleotide Linkage
  misc_feature (20)..(20): Phosphorothioate 3'-Internucleotide Linkage
  misc_feature (22)..(22): Phosphorothioate 3'-Internucleotide Linkage
  misc_feature (24)..(25): Phosphorothioate 3'-Internucleotide Linkage
  misc_feature (28)..(28): Phosphorothioate 3'-Internucleotide Linkage
  misc_feature (30)..(30): Phosphorothioate 3'-Internucleotide Linkage
cgggagaggccgaaaggcgagucaaggucuacgacaga

SEQ ID NO: 4208 - RNA, 38 nt, Artificial Sequence
  Description of Artificial Sequence:  Enzymatic Nucleic Acid
  misc_feature (11)..(16): Phosphorothioate 3'-Internucleotide Linkage
  misc_feature (20)..(20): Phosphorothioate 3'-Internucleotide Linkage
  misc_feature (22)..(22): Phosphorothioate 3'-Internucleotide Linkage
  misc_feature (24)..(25): Phosphorothioate 3'-Internucleotide Linkage
  misc_feature (28)..(28): Phosphorothioate 3'-Internucleotide Linkage
  misc_feature (30)..(30): Phosphorothioate 3'-Internucleotide Linkage
uauauuuggccgaaaggcgagucaaggucugggagagc

SEQ ID NO: 4209 - RNA, 38 nt, Artificial Sequence
  Description of Artificial Sequence:  Enzymatic Nucleic Acid
  misc_feature (11)..(16): Phosphorothioate 3'-Internucleotide Linkage
  misc_feature (20)..(20): Phosphorothioate 3'-Internucleotide Linkage
  misc_feature (22)..(22): Phosphorothioate 3'-Internucleotide Linkage
  misc_feature (24)..(25): Phosphorothioate 3'-Internucleotide Linkage
  misc_feature (28)..(28): Phosphorothioate 3'-Internucleotide Linkage
  misc_feature (30)..(30): Phosphorothioate 3'-Internucleotide Linkage
cagccuaggccgaaaggcgagucaaggucuagccaugg

SEQ ID NO: 4210 - RNA, 38 nt, Artificial Sequence
  Description of Artificial Sequence:  Enzymatic Nucleic Acid
  misc_feature (11)..(16): Phosphorothioate 3'-Internucleotide Linkage
  misc_feature (20)..(20): Phosphorothioate 3'-Internucleotide Linkage
  misc_feature (22)..(22): Phosphorothioate 3'-Internucleotide Linkage
  misc_feature (24)..(25): Phosphorothioate 3'-Internucleotide Linkage
  misc_feature (28)..(28): Phosphorothioate 3'-Internucleotide Linkage
  misc_feature (30)..(30): Phosphorothioate 3'-Internucleotide Linkage
guuggcaggccgaaaggcgagucaaggucuacagccua

SEQ ID NO: 4211 - RNA, 38 nt, Artificial Sequence
  Description of Artificial Sequence:  Enzymatic Nucleic Acid
  misc_feature (11)..(16): Phosphorothioate 3'-Internucleotide Linkage
  misc_feature (20)..(20): Phosphorothioate 3'-Internucleotide Linkage
  misc_feature (22)..(22): Phosphorothioate 3'-Internucleotide Linkage
  misc_feature (24)..(25): Phosphorothioate 3'-Internucleotide Linkage
  misc_feature (28)..(28): Phosphorothioate 3'-Internucleotide Linkage
  misc_feature (30)..(30): Phosphorothioate 3'-Internucleotide Linkage
ccaguugggccgaaaggcgagucaaggucuagcacagc

SEQ ID NO: 4212 - RNA, 38 nt, Artificial Sequence
  Description of Artificial Sequence:  Enzymatic Nucleic Acid
  misc_feature (11)..(16): Phosphorothioate 3'-Internucleotide Linkage
  misc_feature (20)..(20): Phosphorothioate 3'-Internucleotide Linkage
  misc_feature (22)..(22): Phosphorothioate 3'-Internucleotide Linkage
  misc_feature (24)..(25): Phosphorothioate 3'-Internucleotide Linkage
  misc_feature (28)..(28): Phosphorothioate 3'-Internucleotide Linkage
  misc_feature (30)..(30): Phosphorothioate 3'-Internucleotide Linkage
acgucccggccgaaaggcgagucaaggucuguaggauc

SEQ ID NO: 4213 - RNA, 38 nt, Artificial Sequence
  Description of Artificial Sequence:  Enzymatic Nucleic Acid
  misc_feature (11)..(16): Phosphorothioate 3'-Internucleotide Linkage
  misc_feature (20)..(20): Phosphorothioate 3'-Internucleotide Linkage
  misc_feature (22)..(22): Phosphorothioate 3'-Internucleotide Linkage
  misc_feature (24)..(25): Phosphorothioate 3'-Internucleotide Linkage
  misc_feature (28)..(28): Phosphorothioate 3'-Internucleotide Linkage
  misc_feature (30)..(30): Phosphorothioate 3'-Internucleotide Linkage
ggauucaggccgaaaggcgagucaaggucugccgacgg

SEQ ID NO: 4214 - RNA, 38 nt, Artificial Sequence
  Description of Artificial Sequence:  Enzymatic Nucleic Acid
  misc_feature (11)..(16): Phosphorothioate 3'-Internucleotide Linkage
  misc_feature (20)..(20): Phosphorothioate 3'-Internucleotide Linkage
  misc_feature (22)..(22): Phosphorothioate 3'-Internucleotide Linkage
  misc_feature (24)..(25): Phosphorothioate 3'-Internucleotide Linkage
  misc_feature (28)..(28): Phosphorothioate 3'-Internucleotide Linkage
  misc_feature (30)..(30): Phosphorothioate 3'-Internucleotide Linkage
gucguccggccgaaaggcgagucaaggucugggauuca

SEQ ID NO: 4215 - RNA, 38 nt, Artificial Sequence
  Description of Artificial Sequence:  Enzymatic Nucleic Acid
  misc_feature (11)..(16): Phosphorothioate 3'-Internucleotide Linkage
  misc_feature (20)..(20): Phosphorothioate 3'-Internucleotide Linkage
  misc_feature (22)..(22): Phosphorothioate 3'-Internucleotide Linkage
  misc_feature (24)..(25): Phosphorothioate 3'-Internucleotide Linkage
  misc_feature (28)..(28): Phosphorothioate 3'-Internucleotide Linkage
  misc_feature (30)..(30): Phosphorothioate 3'-Internucleotide Linkage
gccccaaggccgaaaggcgagucaaggucuggccccgg

SEQ ID NO: 4216 - RNA, 38 nt, Artificial Sequence
  Description of Artificial Sequence:  Enzymatic Nucleic Acid
  misc_feature (11)..(16): Phosphorothioate 3'-Internucleotide Linkage
  misc_feature (20)..(20): Phosphorothioate 3'-Internucleotide Linkage
  misc_feature (22)..(22): Phosphorothioate 3'-Internucleotide Linkage
  misc_feature (24)..(25): Phosphorothioate 3'-Internucleotide Linkage
  misc_feature (28)..(28): Phosphorothioate 3'-Internucleotide Linkage
  misc_feature (30)..(30): Phosphorothioate 3'-Internucleotide Linkage
gaagcggggccgaaaggcgagucaaggucugguagagc

SEQ ID NO: 4217 - RNA, 38 nt, Artificial Sequence
  Description of Artificial Sequence:  Enzymatic Nucleic Acid
  misc_feature (11)..(16): Phosphorothioate 3'-Internucleotide Linkage
  misc_feature (20)..(20): Phosphorothioate 3'-Internucleotide Linkage
  misc_feature (22)..(22): Phosphorothioate 3'-Internucleotide Linkage
  misc_feature (24)..(25): Phosphorothioate 3'-Internucleotide Linkage
  misc_feature (28)..(28): Phosphorothioate 3'-Internucleotide Linkage
  misc_feature (30)..(30): Phosphorothioate 3'-Internucleotide Linkage
cggagaaggccgaaaggcgagucaaggucugggcggua

SEQ ID NO: 4218 - RNA, 38 nt, Artificial Sequence
  Description of Artificial Sequence:  Enzymatic Nucleic Acid
  misc_feature (11)..(16): Phosphorothioate 3'-Internucleotide Linkage
  misc_feature (20)..(20): Phosphorothioate 3'-Internucleotide Linkage
  misc_feature (22)..(22): Phosphorothioate 3'-Internucleotide Linkage
  misc_feature (24)..(25): Phosphorothioate 3'-Internucleotide Linkage
  misc_feature (28)..(28): Phosphorothioate 3'-Internucleotide Linkage
  misc_feature (30)..(30): Phosphorothioate 3'-Internucleotide Linkage
acaauagggccgaaaggcgagucaaggucuggagaagc

SEQ ID NO: 4219 - RNA, 38 nt, Artificial Sequence
  Description of Artificial Sequence:  Enzymatic Nucleic Acid
  misc_feature (11)..(16): Phosphorothioate 3'-Internucleotide Linkage
  misc_feature (20)..(20): Phosphorothioate 3'-Internucleotide Linkage
  misc_feature (22)..(22): Phosphorothioate 3'-Internucleotide Linkage
  misc_feature (24)..(25): Phosphorothioate 3'-Internucleotide Linkage
  misc_feature (28)..(28): Phosphorothioate 3'-Internucleotide Linkage
  misc_feature (30)..(30): Phosphorothioate 3'-Internucleotide Linkage
gagagguggccgaaaggcgagucaaggucugccccgug

SEQ ID NO: 4220 - RNA, 38 nt, Artificial Sequence
  Description of Artificial Sequence:  Enzymatic Nucleic Acid
  misc_feature (11)..(16): Phosphorothioate 3'-Internucleotide Linkage
  misc_feature (20)..(20): Phosphorothioate 3'-Internucleotide Linkage
  misc_feature (22)..(22): Phosphorothioate 3'-Internucleotide Linkage
  misc_feature (24)..(25): Phosphorothioate 3'-Internucleotide Linkage
  misc_feature (28)..(28): Phosphorothioate 3'-Internucleotide Linkage
  misc_feature (30)..(30): Phosphorothioate 3'-Internucleotide Linkage
ggaguccggccgaaaggcgagucaaggucuguaaagag

SEQ ID NO: 4221 - RNA, 38 nt, Artificial Sequence
  Description of Artificial Sequence:  Enzymatic Nucleic Acid
  misc_feature (11)..(16): Phosphorothioate 3'-Internucleotide Linkage
  misc_feature (20)..(20): Phosphorothioate 3'-Internucleotide Linkage
  misc_feature (22)..(22): Phosphorothioate 3'-Internucleotide Linkage
  misc_feature (24)..(25): Phosphorothioate 3'-Internucleotide Linkage
  misc_feature (28)..(28): Phosphorothioate 3'-Internucleotide Linkage
  misc_feature (30)..(30): Phosphorothioate 3'-Internucleotide Linkage
ugagaagggccgaaaggcgagucaaggucuacagacgg

SEQ ID NO: 4222 - RNA, 38 nt, Artificial Sequence
  Description of Artificial Sequence:  Enzymatic Nucleic Acid
  misc_feature (11)..(16): Phosphorothioate 3'-Internucleotide Linkage
  misc_feature (20)..(20): Phosphorothioate 3'-Internucleotide Linkage
  misc_feature (22)..(22): Phosphorothioate 3'-Internucleotide Linkage
  misc_feature (24)..(25): Phosphorothioate 3'-Internucleotide Linkage
  misc_feature (28)..(28): Phosphorothioate 3'-Internucleotide Linkage
  misc_feature (30)..(30): Phosphorothioate 3'-Internucleotide Linkage
cgguccgggccgaaaggcgagucaaggucuagaugaga

SEQ ID NO: 4223 - RNA, 38 nt, Artificial Sequence
  Description of Artificial Sequence:  Enzymatic Nucleic Acid
  misc_feature (11)..(16): Phosphorothioate 3'-Internucleotide Linkage
  misc_feature (20)..(20): Phosphorothioate 3'-Internucleotide Linkage
  misc_feature (22)..(22): Phosphorothioate 3'-Internucleotide Linkage
  misc_feature (24)..(25): Phosphorothioate 3'-Internucleotide Linkage
  misc_feature (28)..(28): Phosphorothioate 3'-Internucleotide Linkage
  misc_feature (30)..(30): Phosphorothioate 3'-Internucleotide Linkage
gcgaaguggccgaaaggcgagucaaggucuacacgguc

SEQ ID NO: 4224 - RNA, 38 nt, Artificial Sequence
  Description of Artificial Sequence:  Enzymatic Nucleic Acid
  misc_feature (11)..(16): Phosphorothioate 3'-Internucleotide Linkage
  misc_feature (20)..(20): Phosphorothioate 3'-Internucleotide Linkage
  misc_feature (22)..(22): Phosphorothioate 3'-Internucleotide Linkage
  misc_feature (24)..(25): Phosphorothioate 3'-Internucleotide Linkage
  misc_feature (28)..(28): Phosphorothioate 3'-Internucleotide Linkage
  misc_feature (30)..(30): Phosphorothioate 3'-Internucleotide Linkage
aggugaaggccgaaaggcgagucaaggucugaagugca

SEQ ID NO: 4225 - RNA, 38 nt, Artificial Sequence
  Description of Artificial Sequence:  Enzymatic Nucleic Acid
  misc_feature (11)..(16): Phosphorothioate 3'-Internucleotide Linkage
  misc_feature (20)..(20): Phosphorothioate 3'-Internucleotide Linkage
  misc_feature (22)..(22): Phosphorothioate 3'-Internucleotide Linkage
  misc_feature (24)..(25): Phosphorothioate 3'-Internucleotide Linkage
  misc_feature (28)..(28): Phosphorothioate 3'-Internucleotide Linkage
  misc_feature (30)..(30): Phosphorothioate 3'-Internucleotide Linkage
gcgacguggccgaaaggcgagucaaggucuagagguga

SEQ ID NO: 4226 - RNA, 38 nt, Artificial Sequence
  Description of Artificial Sequence:  Enzymatic Nucleic Acid
  misc_feature (11)..(16): Phosphorothioate 3'-Internucleotide Linkage
  misc_feature (20)..(20): Phosphorothioate 3'-Internucleotide Linkage
  misc_feature (22)..(22): Phosphorothioate 3'-Internucleotide Linkage
  misc_feature (24)..(25): Phosphorothioate 3'-Internucleotide Linkage
  misc_feature (28)..(28): Phosphorothioate 3'-Internucleotide Linkage
  misc_feature (30)..(30): Phosphorothioate 3'-Internucleotide Linkage
ucuccauggccgaaaggcgagucaaggucugacgugca

SEQ ID NO: 4227 - RNA, 38 nt, Artificial Sequence
  Description of Artificial Sequence:  Enzymatic Nucleic Acid
  misc_feature (11)..(16): Phosphorothioate 3'-Internucleotide Linkage
  misc_feature (20)..(20): Phosphorothioate 3'-Internucleotide Linkage
  misc_feature (22)..(22): Phosphorothioate 3'-Internucleotide Linkage
  misc_feature (24)..(25): Phosphorothioate 3'-Internucleotide Linkage
  misc_feature (28)..(28): Phosphorothioate 3'-Internucleotide Linkage
  misc_feature (30)..(30): Phosphorothioate 3'-Internucleotide Linkage
ccuguggggccgaaaggcgagucaaggucuguucacgg

SEQ ID NO: 4228 - RNA, 38 nt, Artificial Sequence
  Description of Artificial Sequence:  Enzymatic Nucleic Acid
  misc_feature (11)..(16): Phosphorothioate 3'-Internucleotide Linkage
  misc_feature (20)..(20): Phosphorothioate 3'-Internucleotide Linkage
  misc_feature (22)..(22): Phosphorothioate 3'-Internucleotide Linkage
  misc_feature (24)..(25): Phosphorothioate 3'-Internucleotide Linkage
  misc_feature (28)..(28): Phosphorothioate 3'-Internucleotide Linkage
  misc_feature (30)..(30): Phosphorothioate 3'-Internucleotide Linkage
accuuggggccgaaaggcgagucaaggucuagguuccu

SEQ ID NO: 4229 - RNA, 38 nt, Artificial Sequence
  Description of Artificial Sequence:  Enzymatic Nucleic Acid
  misc_feature (11)..(16): Phosphorothioate 3'-Internucleotide Linkage
  misc_feature (20)..(20): Phosphorothioate 3'-Internucleotide Linkage
  misc_feature (22)..(22): Phosphorothioate 3'-Internucleotide Linkage
  misc_feature (24)..(25): Phosphorothioate 3'-Internucleotide Linkage
  misc_feature (28)..(28): Phosphorothioate 3'-Internucleotide Linkage
  misc_feature (30)..(30): Phosphorothioate 3'-Internucleotide Linkage
cucuuauggccgaaaggcgagucaaggucuaagaccuu

SEQ ID NO: 4230 - RNA, 38 nt, Artificial Sequence
  Description of Artificial Sequence:  Enzymatic Nucleic Acid
  misc_feature (11)..(16): Phosphorothioate 3'-Internucleotide Linkage
  misc_feature (20)..(20): Phosphorothioate 3'-Internucleotide Linkage
  misc_feature (22)..(22): Phosphorothioate 3'-Internucleotide Linkage
  misc_feature (24)..(25): Phosphorothioate 3'-Internucleotide Linkage
  misc_feature (28)..(28): Phosphorothioate 3'-Internucleotide Linkage
  misc_feature (30)..(30): Phosphorothioate 3'-Internucleotide Linkage
aaaaguuggccgaaaggcgagucaaggucuauggugcu

SEQ ID NO: 4231 - RNA, 38 nt, Artificial Sequence
  Description of Artificial Sequence:  Enzymatic Nucleic Acid
  misc_feature (11)..(16): Phosphorothioate 3'-Internucleotide Linkage
  misc_feature (20)..(20): Phosphorothioate 3'-Internucleotide Linkage
  misc_feature (22)..(22): Phosphorothioate 3'-Internucleotide Linkage
  misc_feature (24)..(25): Phosphorothioate 3'-Internucleotide Linkage
  misc_feature (28)..(28): Phosphorothioate 3'-Internucleotide Linkage
  misc_feature (30)..(30): Phosphorothioate 3'-Internucleotide Linkage
ugauuagggccgaaaggcgagucaaggucuagagguga

SEQ ID NO: 4232 - RNA, 38 nt, Artificial Sequence
  Description of Artificial Sequence:  Enzymatic Nucleic Acid
  misc_feature (11)..(16): Phosphorothioate 3'-Internucleotide Linkage
  misc_feature (20)..(20): Phosphorothioate 3'-Internucleotide Linkage
  misc_feature (22)..(22): Phosphorothioate 3'-Internucleotide Linkage
  misc_feature (24)..(25): Phosphorothioate 3'-Internucleotide Linkage
  misc_feature (28)..(28): Phosphorothioate 3'-Internucleotide Linkage
  misc_feature (30)..(30): Phosphorothioate 3'-Internucleotide Linkage
acccaagggccgaaaggcgagucaaggucuacagcuug

SEQ ID NO: 4233 - RNA, 38 nt, Artificial Sequence
  Description of Artificial Sequence:  Enzymatic Nucleic Acid
  misc_feature (11)..(16): Phosphorothioate 3'-Internucleotide Linkage
  misc_feature (20)..(20): Phosphorothioate 3'-Internucleotide Linkage
  misc_feature (22)..(22): Phosphorothioate 3'-Internucleotide Linkage
  misc_feature (24)..(25): Phosphorothioate 3'-Internucleotide Linkage
  misc_feature (28)..(28): Phosphorothioate 3'-Internucleotide Linkage
  misc_feature (30)..(30): Phosphorothioate 3'-Internucleotide Linkage
ucagaagggccgaaaggcgagucaaggucuaaaaaaga

SEQ ID NO: 4234 - RNA, 38 nt, Artificial Sequence
  Description of Artificial Sequence:  Enzymatic Nucleic Acid
  misc_feature (11)..(16): Phosphorothioate 3'-Internucleotide Linkage
  misc_feature (20)..(20): Phosphorothioate 3'-Internucleotide Linkage
  misc_feature (22)..(22): Phosphorothioate 3'-Internucleotide Linkage
  misc_feature (24)..(25): Phosphorothioate 3'-Internucleotide Linkage
  misc_feature (28)..(28): Phosphorothioate 3'-Internucleotide Linkage
  misc_feature (30)..(30): Phosphorothioate 3'-Internucleotide Linkage
agcagagggccgaaaggcgagucaaggucuggugucga

SEQ ID NO: 4235 - RNA, 38 nt, Artificial Sequence
  Description of Artificial Sequence:  Enzymatic Nucleic Acid
  misc_feature (11)..(16): Phosphorothioate 3'-Internucleotide Linkage
  misc_feature (20)..(20): Phosphorothioate 3'-Internucleotide Linkage
  misc_feature (22)..(22): Phosphorothioate 3'-Internucleotide Linkage
  misc_feature (24)..(25): Phosphorothioate 3'-Internucleotide Linkage
  misc_feature (28)..(28): Phosphorothioate 3'-Internucleotide Linkage
  misc_feature (30)..(30): Phosphorothioate 3'-Internucleotide Linkage
auacagaggccgaaaggcgagucaaggucuagaggcgg

SEQ ID NO: 4236 - RNA, 38 nt, Artificial Sequence
  Description of Artificial Sequence:  Enzymatic Nucleic Acid
  misc_feature (11)..(16): Phosphorothioate 3'-Internucleotide Linkage
  misc_feature (20)..(20): Phosphorothioate 3'-Internucleotide Linkage
  misc_feature (22)..(22): Phosphorothioate 3'-Internucleotide Linkage
  misc_feature (24)..(25): Phosphorothioate 3'-Internucleotide Linkage
  misc_feature (28)..(28): Phosphorothioate 3'-Internucleotide Linkage
  misc_feature (30)..(30): Phosphorothioate 3'-Internucleotide Linkage
gaggaguggccgaaaggcgagucaaggucugaauccac

SEQ ID NO: 4237 - RNA, 38 nt, Artificial Sequence
  Description of Artificial Sequence:  Enzymatic Nucleic Acid
  misc_feature (11)..(16): Phosphorothioate 3'-Internucleotide Linkage
  misc_feature (20)..(20): Phosphorothioate 3'-Internucleotide Linkage
  misc_feature (22)..(22): Phosphorothioate 3'-Internucleotide Linkage
  misc_feature (24)..(25): Phosphorothioate 3'-Internucleotide Linkage
  misc_feature (28)..(28): Phosphorothioate 3'-Internucleotide Linkage
  misc_feature (30)..(30): Phosphorothioate 3'-Internucleotide Linkage
ucuauauggccgaaaggcgagucaaggucuaggaggag

SEQ ID NO: 4238 - RNA, 38 nt, Artificial Sequence
  Description of Artificial Sequence:  Enzymatic Nucleic Acid
  misc_feature (11)..(16): Phosphorothioate 3'-Internucleotide Linkage
  misc_feature (20)..(20): Phosphorothioate 3'-Internucleotide Linkage
  misc_feature (22)..(22): Phosphorothioate 3'-Internucleotide Linkage
  misc_feature (24)..(25): Phosphorothioate 3'-Internucleotide Linkage
  misc_feature (28)..(28): Phosphorothioate 3'-Internucleotide Linkage
  misc_feature (30)..(30): Phosphorothioate 3'-Internucleotide Linkage
gauagggggccgaaaggcgagucaaggucuauuuggug

SEQ ID NO: 4239 - RNA, 38 nt, Artificial Sequence
  Description of Artificial Sequence:  Enzymatic Nucleic Acid
  misc_feature (11)..(16): Phosphorothioate 3'-Internucleotide Linkage
  misc_feature (20)..(20): Phosphorothioate 3'-Internucleotide Linkage
  misc_feature (22)..(22): Phosphorothioate 3'-Internucleotide Linkage
  misc_feature (24)..(25): Phosphorothioate 3'-Internucleotide Linkage
  misc_feature (28)..(28): Phosphorothioate 3'-Internucleotide Linkage
  misc_feature (30)..(30): Phosphorothioate 3'-Internucleotide Linkage
cugcgagggccgaaaggcgagucaaggucugagggagu

SEQ ID NO: 4240 - RNA, 38 nt, Artificial Sequence
  Description of Artificial Sequence:  Enzymatic Nucleic Acid
  misc_feature (11)..(16): Phosphorothioate 3'-Internucleotide Linkage
  misc_feature (20)..(20): Phosphorothioate 3'-Internucleotide Linkage
  misc_feature (22)..(22): Phosphorothioate 3'-Internucleotide Linkage
  misc_feature (24)..(25): Phosphorothioate 3'-Internucleotide Linkage
  misc_feature (28)..(28): Phosphorothioate 3'-Internucleotide Linkage
  misc_feature (30)..(30): Phosphorothioate 3'-Internucleotide Linkage
uucgucuggccgaaaggcgagucaaggucugaggcgag

SEQ ID NO: 4241 - RNA, 38 nt, Artificial Sequence
  Description of Artificial Sequence:  Enzymatic Nucleic Acid
  misc_feature (11)..(16): Phosphorothioate 3'-Internucleotide Linkage
  misc_feature (20)..(20): Phosphorothioate 3'-Internucleotide Linkage
  misc_feature (22)..(22): Phosphorothioate 3'-Internucleotide Linkage
  misc_feature (24)..(25): Phosphorothioate 3'-Internucleotide Linkage
  misc_feature (28)..(28): Phosphorothioate 3'-Internucleotide Linkage
  misc_feature (30)..(30): Phosphorothioate 3'-Internucleotide Linkage
cgacgcgggccgaaaggcgagucaaggucugauugaga

SEQ ID NO: 4242 - RNA, 38 nt, Artificial Sequence
  Description of Artificial Sequence:  Enzymatic Nucleic Acid
  misc_feature (11)..(16): Phosphorothioate 3'-Internucleotide Linkage
  misc_feature (20)..(20): Phosphorothioate 3'-Internucleotide Linkage
  misc_feature (22)..(22): Phosphorothioate 3'-Internucleotide Linkage
  misc_feature (24)..(25): Phosphorothioate 3'-Internucleotide Linkage
  misc_feature (28)..(28): Phosphorothioate 3'-Internucleotide Linkage
  misc_feature (30)..(30): Phosphorothioate 3'-Internucleotide Linkage
cugcgacggccgaaaggcgagucaaggucuggcgauug

SEQ ID NO: 4243 - RNA, 38 nt, Artificial Sequence
  Description of Artificial Sequence:  Enzymatic Nucleic Acid
  misc_feature (11)..(16): Phosphorothioate 3'-Internucleotide Linkage
  misc_feature (20)..(20): Phosphorothioate 3'-Internucleotide Linkage
  misc_feature (22)..(22): Phosphorothioate 3'-Internucleotide Linkage
  misc_feature (24)..(25): Phosphorothioate 3'-Internucleotide Linkage
  misc_feature (28)..(28): Phosphorothioate 3'-Internucleotide Linkage
  misc_feature (30)..(30): Phosphorothioate 3'-Internucleotide Linkage
aucuucuggccgaaaggcgagucaaggucugacgcggc

SEQ ID NO: 4244 - RNA, 38 nt, Artificial Sequence
  Description of Artificial Sequence:  Enzymatic Nucleic Acid
  misc_feature (11)..(16): Phosphorothioate 3'-Internucleotide Linkage
  misc_feature (20)..(20): Phosphorothioate 3'-Internucleotide Linkage
  misc_feature (22)..(22): Phosphorothioate 3'-Internucleotide Linkage
  misc_feature (24)..(25): Phosphorothioate 3'-Internucleotide Linkage
  misc_feature (28)..(28): Phosphorothioate 3'-Internucleotide Linkage
  misc_feature (30)..(30): Phosphorothioate 3'-Internucleotide Linkage
gauuaaaggccgaaaggcgagucaaggucuaagguacc

SEQ ID NO: 4245 - RNA, 38 nt, Artificial Sequence
  Description of Artificial Sequence:  Enzymatic Nucleic Acid
  misc_feature (11)..(16): Phosphorothioate 3'-Internucleotide Linkage
  misc_feature (20)..(20): Phosphorothioate 3'-Internucleotide Linkage
  misc_feature (22)..(22): Phosphorothioate 3'-Internucleotide Linkage
  misc_feature (24)..(25): Phosphorothioate 3'-Internucleotide Linkage
  misc_feature (28)..(28): Phosphorothioate 3'-Internucleotide Linkage
  misc_feature (30)..(30): Phosphorothioate 3'-Internucleotide Linkage
uccuccuggccgaaaggcgagucaaggucuaaaugaau

SEQ ID NO: 4246 - RNA, 38 nt, Artificial Sequence
  Description of Artificial Sequence:  Enzymatic Nucleic Acid
  misc_feature (11)..(16): Phosphorothioate 3'-Internucleotide Linkage
  misc_feature (20)..(20): Phosphorothioate 3'-Internucleotide Linkage
  misc_feature (22)..(22): Phosphorothioate 3'-Internucleotide Linkage
  misc_feature (24)..(25): Phosphorothioate 3'-Internucleotide Linkage
  misc_feature (28)..(28): Phosphorothioate 3'-Internucleotide Linkage
  misc_feature (30)..(30): Phosphorothioate 3'-Internucleotide Linkage
cuagcagggccgaaaggcgagucaaggucuauaguuaa

SEQ ID NO: 4247 - RNA, 38 nt, Artificial Sequence
  Description of Artificial Sequence:  Enzymatic Nucleic Acid
  misc_feature (11)..(16): Phosphorothioate 3'-Internucleotide Linkage
  misc_feature (20)..(20): Phosphorothioate 3'-Internucleotide Linkage
  misc_feature (22)..(22): Phosphorothioate 3'-Internucleotide Linkage
  misc_feature (24)..(25): Phosphorothioate 3'-Internucleotide Linkage
  misc_feature (28)..(28): Phosphorothioate 3'-Internucleotide Linkage
  misc_feature (30)..(30): Phosphorothioate 3'-Internucleotide Linkage
aaaccuaggccgaaaggcgagucaaggucuaggcauag

SEQ ID NO: 4248 - RNA, 38 nt, Artificial Sequence
  Description of Artificial Sequence:  Enzymatic Nucleic Acid
  misc_feature (11)..(16): Phosphorothioate 3'-Internucleotide Linkage
  misc_feature (20)..(20): Phosphorothioate 3'-Internucleotide Linkage
  misc_feature (22)..(22): Phosphorothioate 3'-Internucleotide Linkage
  misc_feature (24)..(25): Phosphorothioate 3'-Internucleotide Linkage
  misc_feature (28)..(28): Phosphorothioate 3'-Internucleotide Linkage
  misc_feature (30)..(30): Phosphorothioate 3'-Internucleotide Linkage
ucuaaggggccgaaaggcgagucaaggucuaaauauuu

SEQ ID NO: 4249 - RNA, 38 nt, Artificial Sequence
  Description of Artificial Sequence:  Enzymatic Nucleic Acid
  misc_feature (11)..(16): Phosphorothioate 3'-Internucleotide Linkage
  misc_feature (20)..(20): Phosphorothioate 3'-Internucleotide Linkage
  misc_feature (22)..(22): Phosphorothioate 3'-Internucleotide Linkage
  misc_feature (24)..(25): Phosphorothioate 3'-Internucleotide Linkage
  misc_feature (28)..(28): Phosphorothioate 3'-Internucleotide Linkage
  misc_feature (30)..(30): Phosphorothioate 3'-Internucleotide Linkage
uaaugucggccgaaaggcgagucaaggucugucuggaa

SEQ ID NO: 4250 - RNA, 38 nt, Artificial Sequence
  Description of Artificial Sequence:  Enzymatic Nucleic Acid
  misc_feature (11)..(16): Phosphorothioate 3'-Internucleotide Linkage
  misc_feature (20)..(20): Phosphorothioate 3'-Internucleotide Linkage
  misc_feature (22)..(22): Phosphorothioate 3'-Internucleotide Linkage
  misc_feature (24)..(25): Phosphorothioate 3'-Internucleotide Linkage
  misc_feature (28)..(28): Phosphorothioate 3'-Internucleotide Linkage
  misc_feature (30)..(30): Phosphorothioate 3'-Internucleotide Linkage
aaaugagggccgaaaggcgagucaaggucugcuacgug

SEQ ID NO: 4251 - RNA, 38 nt, Artificial Sequence
  Description of Artificial Sequence:  Enzymatic Nucleic Acid
  misc_feature (11)..(16): Phosphorothioate 3'-Internucleotide Linkage
  misc_feature (20)..(20): Phosphorothioate 3'-Internucleotide Linkage
  misc_feature (22)..(22): Phosphorothioate 3'-Internucleotide Linkage
  misc_feature (24)..(25): Phosphorothioate 3'-Internucleotide Linkage
  misc_feature (28)..(28): Phosphorothioate 3'-Internucleotide Linkage
  misc_feature (30)..(30): Phosphorothioate 3'-Internucleotide Linkage
gugacccggccgaaaggcgagucaaggucuaaaaugag

SEQ ID NO: 4252 - RNA, 38 nt, Artificial Sequence
  Description of Artificial Sequence:  Enzymatic Nucleic Acid
  misc_feature (11)..(16): Phosphorothioate 3'-Internucleotide Linkage
  misc_feature (20)..(20): Phosphorothioate 3'-Internucleotide Linkage
  misc_feature (22)..(22): Phosphorothioate 3'-Internucleotide Linkage
  misc_feature (24)..(25): Phosphorothioate 3'-Internucleotide Linkage
  misc_feature (28)..(28): Phosphorothioate 3'-Internucleotide Linkage
  misc_feature (30)..(30): Phosphorothioate 3'-Internucleotide Linkage
uuugaauggccgaaaggcgagucaaggucuagggucca

SEQ ID NO: 4253 - RNA, 38 nt, Artificial Sequence
  Description of Artificial Sequence:  Enzymatic Nucleic Acid
  misc_feature (11)..(16): Phosphorothioate 3'-Internucleotide Linkage
  misc_feature (20)..(20): Phosphorothioate 3'-Internucleotide Linkage
  misc_feature (22)..(22): Phosphorothioate 3'-Internucleotide Linkage
  misc_feature (24)..(25): Phosphorothioate 3'-Internucleotide Linkage
  misc_feature (28)..(28): Phosphorothioate 3'-Internucleotide Linkage
  misc_feature (30)..(30): Phosphorothioate 3'-Internucleotide Linkage
uccuuguggccgaaaggcgagucaaggucuggguugag

SEQ ID NO: 4254 - RNA, 38 nt, Artificial Sequence
  Description of Artificial Sequence:  Enzymatic Nucleic Acid
  misc_feature (11)..(16): Phosphorothioate 3'-Internucleotide Linkage
  misc_feature (20)..(20): Phosphorothioate 3'-Internucleotide Linkage
  misc_feature (22)..(22): Phosphorothioate 3'-Internucleotide Linkage
  misc_feature (24)..(25): Phosphorothioate 3'-Internucleotide Linkage
  misc_feature (28)..(28): Phosphorothioate 3'-Internucleotide Linkage
  misc_feature (30)..(30): Phosphorothioate 3'-Internucleotide Linkage
cuuguugggccgaaaggcgagucaaggucuguccggcc

SEQ ID NO: 4255 - RNA, 38 nt, Artificial Sequence
  Description of Artificial Sequence:  Enzymatic Nucleic Acid
  misc_feature (11)..(16): Phosphorothioate 3'-Internucleotide Linkage
  misc_feature (20)..(20): Phosphorothioate 3'-Internucleotide Linkage
  misc_feature (22)..(22): Phosphorothioate 3'-Internucleotide Linkage
  misc_feature (24)..(25): Phosphorothioate 3'-Internucleotide Linkage
  misc_feature (28)..(28): Phosphorothioate 3'-Internucleotide Linkage
  misc_feature (30)..(30): Phosphorothioate 3'-Internucleotide Linkage
gcccugaggccgaaaggcgagucaaggucugugagggc

SEQ ID NO: 4256 - RNA, 38 nt, Artificial Sequence
  Description of Artificial Sequence:  Enzymatic Nucleic Acid
  misc_feature (11)..(16): Phosphorothioate 3'-Internucleotide Linkage
  misc_feature (20)..(20): Phosphorothioate 3'-Internucleotide Linkage
  misc_feature (22)..(22): Phosphorothioate 3'-Internucleotide Linkage
  misc_feature (24)..(25): Phosphorothioate 3'-Internucleotide Linkage
  misc_feature (28)..(28): Phosphorothioate 3'-Internucleotide Linkage
  misc_feature (30)..(30): Phosphorothioate 3'-Internucleotide Linkage
gcugcugggccgaaaggcgagucaaggucuacaguugu

SEQ ID NO: 4257 - RNA, 38 nt, Artificial Sequence
  Description of Artificial Sequence:  Enzymatic Nucleic Acid
  misc_feature (11)..(16): Phosphorothioate 3'-Internucleotide Linkage
  misc_feature (20)..(20): Phosphorothioate 3'-Internucleotide Linkage
  misc_feature (22)..(22): Phosphorothioate 3'-Internucleotide Linkage
  misc_feature (24)..(25): Phosphorothioate 3'-Internucleotide Linkage
  misc_feature (28)..(28): Phosphorothioate 3'-Internucleotide Linkage
  misc_feature (30)..(30): Phosphorothioate 3'-Internucleotide Linkage
gguggagggccgaaaggcgagucaaggucuaggaggag

SEQ ID NO: 4258 - RNA, 38 nt, Artificial Sequence
  Description of Artificial Sequence:  Enzymatic Nucleic Acid
  misc_feature (11)..(16): Phosphorothioate 3'-Internucleotide Linkage
  misc_feature (20)..(20): Phosphorothioate 3'-Internucleotide Linkage
  misc_feature (22)..(22): Phosphorothioate 3'-Internucleotide Linkage
  misc_feature (24)..(25): Phosphorothioate 3'-Internucleotide Linkage
  misc_feature (28)..(28): Phosphorothioate 3'-Internucleotide Linkage
  misc_feature (30)..(30): Phosphorothioate 3'-Internucleotide Linkage
ggaaaguagccgaaaggcgagucaaggucuagggcccu

SEQ ID NO: 4259 - RNA, 38 nt, Artificial Sequence
  Description of Artificial Sequence:  Enzymatic Nucleic Acid
  misc_feature (11)..(16): Phosphorothioate 3'-Internucleotide Linkage
  misc_feature (20)..(20): Phosphorothioate 3'-Internucleotide Linkage
  misc_feature (22)..(22): Phosphorothioate 3'-Internucleotide Linkage
  misc_feature (24)..(25): Phosphorothioate 3'-Internucleotide Linkage
  misc_feature (28)..(28): Phosphorothioate 3'-Internucleotide Linkage
  misc_feature (30)..(30): Phosphorothioate 3'-Internucleotide Linkage
ggcagagagccgaaaggcgagucaaggucuaguauucu

SEQ ID NO: 4260 - RNA, 38 nt, Artificial Sequence
  Description of Artificial Sequence:  Enzymatic Nucleic Acid
  misc_feature (11)..(16): Phosphorothioate 3'-Internucleotide Linkage
  misc_feature (20)..(20): Phosphorothioate 3'-Internucleotide Linkage
  misc_feature (22)..(22): Phosphorothioate 3'-Internucleotide Linkage
  misc_feature (24)..(25): Phosphorothioate 3'-Internucleotide Linkage
  misc_feature (28)..(28): Phosphorothioate 3'-Internucleotide Linkage
  misc_feature (30)..(30): Phosphorothioate 3'-Internucleotide Linkage
guucgguagccgaaaggcgagucaaggucuaggguccc

SEQ ID NO: 4261 - RNA, 38 nt, Artificial Sequence
  Description of Artificial Sequence:  Enzymatic Nucleic Acid
  misc_feature (11)..(16): Phosphorothioate 3'-Internucleotide Linkage
  misc_feature (20)..(20): Phosphorothioate 3'-Internucleotide Linkage
  misc_feature (22)..(22): Phosphorothioate 3'-Internucleotide Linkage
  misc_feature (24)..(25): Phosphorothioate 3'-Internucleotide Linkage
  misc_feature (28)..(28): Phosphorothioate 3'-Internucleotide Linkage
  misc_feature (30)..(30): Phosphorothioate 3'-Internucleotide Linkage
gccuguaagccgaaaggcgagucaaggucuacgagcag

SEQ ID NO: 4262 - RNA, 38 nt, Artificial Sequence
  Description of Artificial Sequence:  Enzymatic Nucleic Acid
  misc_feature (11)..(16): Phosphorothioate 3'-Internucleotide Linkage
  misc_feature (20)..(20): Phosphorothioate 3'-Internucleotide Linkage
  misc_feature (22)..(22): Phosphorothioate 3'-Internucleotide Linkage
  misc_feature (24)..(25): Phosphorothioate 3'-Internucleotide Linkage
  misc_feature (28)..(28): Phosphorothioate 3'-Internucleotide Linkage
  misc_feature (30)..(30): Phosphorothioate 3'-Internucleotide Linkage
uuugucaagccgaaaggcgagucaaggucuaagaaaaa

SEQ ID NO: 4263 - RNA, 38 nt, Artificial Sequence
  Description of Artificial Sequence:  Enzymatic Nucleic Acid
  misc_feature (11)..(16): Phosphorothioate 3'-Internucleotide Linkage
  misc_feature (20)..(20): Phosphorothioate 3'-Internucleotide Linkage
  misc_feature (22)..(22): Phosphorothioate 3'-Internucleotide Linkage
  misc_feature (24)..(25): Phosphorothioate 3'-Internucleotide Linkage
  misc_feature (28)..(28): Phosphorothioate 3'-Internucleotide Linkage
  misc_feature (30)..(30): Phosphorothioate 3'-Internucleotide Linkage
ccaagacagccgaaaggcgagucaaggucuacgggugu

SEQ ID NO: 4264 - RNA, 38 nt, Artificial Sequence
  Description of Artificial Sequence:  Enzymatic Nucleic Acid
  misc_feature (11)..(16): Phosphorothioate 3'-Internucleotide Linkage
  misc_feature (20)..(20): Phosphorothioate 3'-Internucleotide Linkage
  misc_feature (22)..(22): Phosphorothioate 3'-Internucleotide Linkage
  misc_feature (24)..(25): Phosphorothioate 3'-Internucleotide Linkage
  misc_feature (28)..(28): Phosphorothioate 3'-Internucleotide Linkage
  misc_feature (30)..(30): Phosphorothioate 3'-Internucleotide Linkage
ggccaagagccgaaaggcgagucaaggucuacacgggu

SEQ ID NO: 4265 - RNA, 38 nt, Artificial Sequence
  Description of Artificial Sequence:  Enzymatic Nucleic Acid
  misc_feature (11)..(16): Phosphorothioate 3'-Internucleotide Linkage
  misc_feature (20)..(20): Phosphorothioate 3'-Internucleotide Linkage
  misc_feature (22)..(22): Phosphorothioate 3'-Internucleotide Linkage
  misc_feature (24)..(25): Phosphorothioate 3'-Internucleotide Linkage
  misc_feature (28)..(28): Phosphorothioate 3'-Internucleotide Linkage
  misc_feature (30)..(30): Phosphorothioate 3'-Internucleotide Linkage
gaggacaagccgaaaggcgagucaaggucuagguuggu

SEQ ID NO: 4266 - RNA, 38 nt, Artificial Sequence
  Description of Artificial Sequence:  Enzymatic Nucleic Acid
  misc_feature (11)..(16): Phosphorothioate 3'-Internucleotide Linkage
  misc_feature (20)..(20): Phosphorothioate 3'-Internucleotide Linkage
  misc_feature (22)..(22): Phosphorothioate 3'-Internucleotide Linkage
  misc_feature (24)..(25): Phosphorothioate 3'-Internucleotide Linkage
  misc_feature (28)..(28): Phosphorothioate 3'-Internucleotide Linkage
  misc_feature (30)..(30): Phosphorothioate 3'-Internucleotide Linkage
uuggaggagccgaaaggcgagucaaggucuaacagguu

SEQ ID NO: 4267 - RNA, 38 nt, Artificial Sequence
  Description of Artificial Sequence:  Enzymatic Nucleic Acid
  misc_feature (11)..(16): Phosphorothioate 3'-Internucleotide Linkage
  misc_feature (20)..(20): Phosphorothioate 3'-Internucleotide Linkage
  misc_feature (22)..(22): Phosphorothioate 3'-Internucleotide Linkage
  misc_feature (24)..(25): Phosphorothioate 3'-Internucleotide Linkage
  misc_feature (28)..(28): Phosphorothioate 3'-Internucleotide Linkage
  misc_feature (30)..(30): Phosphorothioate 3'-Internucleotide Linkage
aaccaggagccgaaaggcgagucaaggucuaaauugga

SEQ ID NO: 4268 - RNA, 38 nt, Artificial Sequence
  Description of Artificial Sequence:  Enzymatic Nucleic Acid
  misc_feature (11)..(16): Phosphorothioate 3'-Internucleotide Linkage
  misc_feature (20)..(20): Phosphorothioate 3'-Internucleotide Linkage
  misc_feature (22)..(22): Phosphorothioate 3'-Internucleotide Linkage
  misc_feature (24)..(25): Phosphorothioate 3'-Internucleotide Linkage
  misc_feature (28)..(28): Phosphorothioate 3'-Internucleotide Linkage
  misc_feature (30)..(30): Phosphorothioate 3'-Internucleotide Linkage
cgcagacagccgaaaggcgagucaaggucuauccagcg

SEQ ID NO: 4269 - RNA, 38 nt, Artificial Sequence
  Description of Artificial Sequence:  Enzymatic Nucleic Acid
  misc_feature (11)..(16): Phosphorothioate 3'-Internucleotide Linkage
  misc_feature (20)..(20): Phosphorothioate 3'-Internucleotide Linkage
  misc_feature (22)..(22): Phosphorothioate 3'-Internucleotide Linkage
  misc_feature (24)..(25): Phosphorothioate 3'-Internucleotide Linkage
  misc_feature (28)..(28): Phosphorothioate 3'-Internucleotide Linkage
  misc_feature (30)..(30): Phosphorothioate 3'-Internucleotide Linkage
gccgcagagccgaaaggcgagucaaggucuacauccag

SEQ ID NO: 4270 - RNA, 38 nt, Artificial Sequence
  Description of Artificial Sequence:  Enzymatic Nucleic Acid
  misc_feature (11)..(16): Phosphorothioate 3'-Internucleotide Linkage
  misc_feature (20)..(20): Phosphorothioate 3'-Internucleotide Linkage
  misc_feature (22)..(22): Phosphorothioate 3'-Internucleotide Linkage
  misc_feature (24)..(25): Phosphorothioate 3'-Internucleotide Linkage
  misc_feature (28)..(28): Phosphorothioate 3'-Internucleotide Linkage
  misc_feature (30)..(30): Phosphorothioate 3'-Internucleotide Linkage
agaaccaagccgaaaggcgagucaaggucuaagaagau

SEQ ID NO: 4271 - RNA, 38 nt, Artificial Sequence
  Description of Artificial Sequence:  Enzymatic Nucleic Acid
  misc_feature (11)..(16): Phosphorothioate 3'-Internucleotide Linkage
  misc_feature (20)..(20): Phosphorothioate 3'-Internucleotide Linkage
  misc_feature (22)..(22): Phosphorothioate 3'-Internucleotide Linkage
  misc_feature (24)..(25): Phosphorothioate 3'-Internucleotide Linkage
  misc_feature (28)..(28): Phosphorothioate 3'-Internucleotide Linkage
  misc_feature (30)..(30): Phosphorothioate 3'-Internucleotide Linkage
acgggcaagccgaaaggcgagucaaggucuauaccuug

SEQ ID NO: 4272 - RNA, 38 nt, Artificial Sequence
  Description of Artificial Sequence:  Enzymatic Nucleic Acid
  misc_feature (11)..(16): Phosphorothioate 3'-Internucleotide Linkage
  misc_feature (20)..(20): Phosphorothioate 3'-Internucleotide Linkage
  misc_feature (22)..(22): Phosphorothioate 3'-Internucleotide Linkage
  misc_feature (24)..(25): Phosphorothioate 3'-Internucleotide Linkage
  misc_feature (28)..(28): Phosphorothioate 3'-Internucleotide Linkage
  misc_feature (30)..(30): Phosphorothioate 3'-Internucleotide Linkage
uuagaggagccgaaaggcgagucaaggucuaaacgggc

SEQ ID NO: 4273 - RNA, 38 nt, Artificial Sequence
  Description of Artificial Sequence:  Enzymatic Nucleic Acid
  misc_feature (11)..(16): Phosphorothioate 3'-Internucleotide Linkage
  misc_feature (20)..(20): Phosphorothioate 3'-Internucleotide Linkage
  misc_feature (22)..(22): Phosphorothioate 3'-Internucleotide Linkage
  misc_feature (24)..(25): Phosphorothioate 3'-Internucleotide Linkage
  misc_feature (28)..(28): Phosphorothioate 3'-Internucleotide Linkage
  misc_feature (30)..(30): Phosphorothioate 3'-Internucleotide Linkage
gagggaaagccgaaaggcgagucaaggucuauagaggu

SEQ ID NO: 4274 - RNA, 38 nt, Artificial Sequence
  Description of Artificial Sequence:  Enzymatic Nucleic Acid
  misc_feature (11)..(16): Phosphorothioate 3'-Internucleotide Linkage
  misc_feature (20)..(20): Phosphorothioate 3'-Internucleotide Linkage
  misc_feature (22)..(22): Phosphorothioate 3'-Internucleotide Linkage
  misc_feature (24)..(25): Phosphorothioate 3'-Internucleotide Linkage
  misc_feature (28)..(28): Phosphorothioate 3'-Internucleotide Linkage
  misc_feature (30)..(30): Phosphorothioate 3'-Internucleotide Linkage
uacagcaagccgaaaggcgagucaaggucuaugaggga

SEQ ID NO: 4275 - RNA, 38 nt, Artificial Sequence
  Description of Artificial Sequence:  Enzymatic Nucleic Acid
  misc_feature (11)..(16): Phosphorothioate 3'-Internucleotide Linkage
  misc_feature (20)..(20): Phosphorothioate 3'-Internucleotide Linkage
  misc_feature (22)..(22): Phosphorothioate 3'-Internucleotide Linkage
  misc_feature (24)..(25): Phosphorothioate 3'-Internucleotide Linkage
  misc_feature (28)..(28): Phosphorothioate 3'-Internucleotide Linkage
  misc_feature (30)..(30): Phosphorothioate 3'-Internucleotide Linkage
guuuuguagccgaaaggcgagucaaggucuagcaacau

SEQ ID NO: 4276 - RNA, 38 nt, Artificial Sequence
  Description of Artificial Sequence:  Enzymatic Nucleic Acid
  misc_feature (11)..(16): Phosphorothioate 3'-Internucleotide Linkage
  misc_feature (20)..(20): Phosphorothioate 3'-Internucleotide Linkage
  misc_feature (22)..(22): Phosphorothioate 3'-Internucleotide Linkage
  misc_feature (24)..(25): Phosphorothioate 3'-Internucleotide Linkage
  misc_feature (28)..(28): Phosphorothioate 3'-Internucleotide Linkage
  misc_feature (30)..(30): Phosphorothioate 3'-Internucleotide Linkage
ugggaauagccgaaaggcgagucaaggucuaggugcag

SEQ ID NO: 4277 - RNA, 38 nt, Artificial Sequence
  Description of Artificial Sequence:  Enzymatic Nucleic Acid
  misc_feature (11)..(16): Phosphorothioate 3'-Internucleotide Linkage
  misc_feature (20)..(20): Phosphorothioate 3'-Internucleotide Linkage
  misc_feature (22)..(22): Phosphorothioate 3'-Internucleotide Linkage
  misc_feature (24)..(25): Phosphorothioate 3'-Internucleotide Linkage
  misc_feature (28)..(28): Phosphorothioate 3'-Internucleotide Linkage
  misc_feature (30)..(30): Phosphorothioate 3'-Internucleotide Linkage
ccacugaagccgaaaggcgagucaaggucuaaauggca

SEQ ID NO: 4278 - RNA, 38 nt, Artificial Sequence
  Description of Artificial Sequence:  Enzymatic Nucleic Acid
  misc_feature (11)..(16): Phosphorothioate 3'-Internucleotide Linkage
  misc_feature (20)..(20): Phosphorothioate 3'-Internucleotide Linkage
  misc_feature (22)..(22): Phosphorothioate 3'-Internucleotide Linkage
  misc_feature (24)..(25): Phosphorothioate 3'-Internucleotide Linkage
  misc_feature (28)..(28): Phosphorothioate 3'-Internucleotide Linkage
  misc_feature (30)..(30): Phosphorothioate 3'-Internucleotide Linkage
aagccagagccgaaaggcgagucaaggucuaguggggg

SEQ ID NO: 4279 - RNA, 38 nt, Artificial Sequence
  Description of Artificial Sequence:  Enzymatic Nucleic Acid
  misc_feature (11)..(16): Phosphorothioate 3'-Internucleotide Linkage
  misc_feature (20)..(20): Phosphorothioate 3'-Internucleotide Linkage
  misc_feature (22)..(22): Phosphorothioate 3'-Internucleotide Linkage
  misc_feature (24)..(25): Phosphorothioate 3'-Internucleotide Linkage
  misc_feature (28)..(28): Phosphorothioate 3'-Internucleotide Linkage
  misc_feature (30)..(30): Phosphorothioate 3'-Internucleotide Linkage
caaaaccagccgaaaggcgagucaaggucuaucaucca

SEQ ID NO: 4280 - RNA, 38 nt, Artificial Sequence
  Description of Artificial Sequence:  Enzymatic Nucleic Acid
  misc_feature (11)..(16): Phosphorothioate 3'-Internucleotide Linkage
  misc_feature (20)..(20): Phosphorothioate 3'-Internucleotide Linkage
  misc_feature (22)..(22): Phosphorothioate 3'-Internucleotide Linkage
  misc_feature (24)..(25): Phosphorothioate 3'-Internucleotide Linkage
  misc_feature (28)..(28): Phosphorothioate 3'-Internucleotide Linkage
  misc_feature (30)..(30): Phosphorothioate 3'-Internucleotide Linkage
auguuguagccgaaaggcgagucaaggucuagacuugg

SEQ ID NO: 4281 - RNA, 38 nt, Artificial Sequence
  Description of Artificial Sequence:  Enzymatic Nucleic Acid
  misc_feature (11)..(16): Phosphorothioate 3'-Internucleotide Linkage
  misc_feature (20)..(20): Phosphorothioate 3'-Internucleotide Linkage
  misc_feature (22)..(22): Phosphorothioate 3'-Internucleotide Linkage
  misc_feature (24)..(25): Phosphorothioate 3'-Internucleotide Linkage
  misc_feature (28)..(28): Phosphorothioate 3'-Internucleotide Linkage
  misc_feature (30)..(30): Phosphorothioate 3'-Internucleotide Linkage
auugguaagccgaaaggcgagucaaggucuagcggcau

SEQ ID NO: 4282 - RNA, 38 nt, Artificial Sequence
  Description of Artificial Sequence:  Enzymatic Nucleic Acid
  misc_feature (11)..(16): Phosphorothioate 3'-Internucleotide Linkage
  misc_feature (20)..(20): Phosphorothioate 3'-Internucleotide Linkage
  misc_feature (22)..(22): Phosphorothioate 3'-Internucleotide Linkage
  misc_feature (24)..(25): Phosphorothioate 3'-Internucleotide Linkage
  misc_feature (28)..(28): Phosphorothioate 3'-Internucleotide Linkage
  misc_feature (30)..(30): Phosphorothioate 3'-Internucleotide Linkage
cccaaagagccgaaaggcgagucaaggucuaaaagaaa

SEQ ID NO: 4283 - RNA, 38 nt, Artificial Sequence
  Description of Artificial Sequence:  Enzymatic Nucleic Acid
  misc_feature (11)..(16): Phosphorothioate 3'-Internucleotide Linkage
  misc_feature (20)..(20): Phosphorothioate 3'-Internucleotide Linkage
  misc_feature (22)..(22): Phosphorothioate 3'-Internucleotide Linkage
  misc_feature (24)..(25): Phosphorothioate 3'-Internucleotide Linkage
  misc_feature (28)..(28): Phosphorothioate 3'-Internucleotide Linkage
  misc_feature (30)..(30): Phosphorothioate 3'-Internucleotide Linkage
cccaauuagccgaaaggcgagucaaggucuauauccca

SEQ ID NO: 4284 - RNA, 38 nt, Artificial Sequence
  Description of Artificial Sequence:  Enzymatic Nucleic Acid
  misc_feature (11)..(16): Phosphorothioate 3'-Internucleotide Linkage
  misc_feature (20)..(20): Phosphorothioate 3'-Internucleotide Linkage
  misc_feature (22)..(22): Phosphorothioate 3'-Internucleotide Linkage
  misc_feature (24)..(25): Phosphorothioate 3'-Internucleotide Linkage
  misc_feature (28)..(28): Phosphorothioate 3'-Internucleotide Linkage
  misc_feature (30)..(30): Phosphorothioate 3'-Internucleotide Linkage
uuuuuguagccgaaaggcgagucaaggucuaauauguu

SEQ ID NO: 4285 - RNA, 38 nt, Artificial Sequence
  Description of Artificial Sequence:  Enzymatic Nucleic Acid
  misc_feature (11)..(16): Phosphorothioate 3'-Internucleotide Linkage
  misc_feature (20)..(20): Phosphorothioate 3'-Internucleotide Linkage
  misc_feature (22)..(22): Phosphorothioate 3'-Internucleotide Linkage
  misc_feature (24)..(25): Phosphorothioate 3'-Internucleotide Linkage
  misc_feature (28)..(28): Phosphorothioate 3'-Internucleotide Linkage
  misc_feature (30)..(30): Phosphorothioate 3'-Internucleotide Linkage
cuaaaacagccgaaaggcgagucaaggucuauuuugau

SEQ ID NO: 4286 - RNA, 38 nt, Artificial Sequence
  Description of Artificial Sequence:  Enzymatic Nucleic Acid
  misc_feature (11)..(16): Phosphorothioate 3'-Internucleotide Linkage
  misc_feature (20)..(20): Phosphorothioate 3'-Internucleotide Linkage
  misc_feature (22)..(22): Phosphorothioate 3'-Internucleotide Linkage
  misc_feature (24)..(25): Phosphorothioate 3'-Internucleotide Linkage
  misc_feature (28)..(28): Phosphorothioate 3'-Internucleotide Linkage
  misc_feature (30)..(30): Phosphorothioate 3'-Internucleotide Linkage
uccuaaaagccgaaaggcgagucaaggucuacauuuug

SEQ ID NO: 4287 - RNA, 38 nt, Artificial Sequence
  Description of Artificial Sequence:  Enzymatic Nucleic Acid
  misc_feature (11)..(16): Phosphorothioate 3'-Internucleotide Linkage
  misc_feature (20)..(20): Phosphorothioate 3'-Internucleotide Linkage
  misc_feature (22)..(22): Phosphorothioate 3'-Internucleotide Linkage
  misc_feature (24)..(25): Phosphorothioate 3'-Internucleotide Linkage
  misc_feature (28)..(28): Phosphorothioate 3'-Internucleotide Linkage
  misc_feature (30)..(30): Phosphorothioate 3'-Internucleotide Linkage
ccuguuuagccgaaaggcgagucaaggucuaggaaguu

SEQ ID NO: 4288 - RNA, 38 nt, Artificial Sequence
  Description of Artificial Sequence:  Enzymatic Nucleic Acid
  misc_feature (11)..(16): Phosphorothioate 3'-Internucleotide Linkage
  misc_feature (20)..(20): Phosphorothioate 3'-Internucleotide Linkage
  misc_feature (22)..(22): Phosphorothioate 3'-Internucleotide Linkage
  misc_feature (24)..(25): Phosphorothioate 3'-Internucleotide Linkage
  misc_feature (28)..(28): Phosphorothioate 3'-Internucleotide Linkage
  misc_feature (30)..(30): Phosphorothioate 3'-Internucleotide Linkage
uucguugagccgaaaggcgagucaaggucuauacuuuc

SEQ ID NO: 4289 - RNA, 38 nt, Artificial Sequence
  Description of Artificial Sequence:  Enzymatic Nucleic Acid
  misc_feature (11)..(16): Phosphorothioate 3'-Internucleotide Linkage
  misc_feature (20)..(20): Phosphorothioate 3'-Internucleotide Linkage
  misc_feature (22)..(22): Phosphorothioate 3'-Internucleotide Linkage
  misc_feature (24)..(25): Phosphorothioate 3'-Internucleotide Linkage
  misc_feature (28)..(28): Phosphorothioate 3'-Internucleotide Linkage
  misc_feature (30)..(30): Phosphorothioate 3'-Internucleotide Linkage
aagacccagccgaaaggcgagucaaggucuaauucguu

SEQ ID NO: 4290 - RNA, 38 nt, Artificial Sequence
  Description of Artificial Sequence:  Enzymatic Nucleic Acid
  misc_feature (11)..(16): Phosphorothioate 3'-Internucleotide Linkage
  misc_feature (20)..(20): Phosphorothioate 3'-Internucleotide Linkage
  misc_feature (22)..(22): Phosphorothioate 3'-Internucleotide Linkage
  misc_feature (24)..(25): Phosphorothioate 3'-Internucleotide Linkage
  misc_feature (28)..(28): Phosphorothioate 3'-Internucleotide Linkage
  misc_feature (30)..(30): Phosphorothioate 3'-Internucleotide Linkage
aauauccagccgaaaggcgagucaaggucuauugcgug

SEQ ID NO: 4291 - RNA, 38 nt, Artificial Sequence
  Description of Artificial Sequence:  Enzymatic Nucleic Acid
  misc_feature (11)..(16): Phosphorothioate 3'-Internucleotide Linkage
  misc_feature (20)..(20): Phosphorothioate 3'-Internucleotide Linkage
  misc_feature (22)..(22): Phosphorothioate 3'-Internucleotide Linkage
  misc_feature (24)..(25): Phosphorothioate 3'-Internucleotide Linkage
  misc_feature (28)..(28): Phosphorothioate 3'-Internucleotide Linkage
  misc_feature (30)..(30): Phosphorothioate 3'-Internucleotide Linkage
aagguucagccgaaaggcgagucaaggucuauacuguu

SEQ ID NO: 4292 - RNA, 38 nt, Artificial Sequence
  Description of Artificial Sequence:  Enzymatic Nucleic Acid
  misc_feature (11)..(16): Phosphorothioate 3'-Internucleotide Linkage
  misc_feature (20)..(20): Phosphorothioate 3'-Internucleotide Linkage
  misc_feature (22)..(22): Phosphorothioate 3'-Internucleotide Linkage
  misc_feature (24)..(25): Phosphorothioate 3'-Internucleotide Linkage
  misc_feature (28)..(28): Phosphorothioate 3'-Internucleotide Linkage
  misc_feature (30)..(30): Phosphorothioate 3'-Internucleotide Linkage
ucagcaaagccgaaaggcgagucaaggucuacuuggca

SEQ ID NO: 4293 - RNA, 38 nt, Artificial Sequence
  Description of Artificial Sequence:  Enzymatic Nucleic Acid
  misc_feature (11)..(16): Phosphorothioate 3'-Internucleotide Linkage
  misc_feature (20)..(20): Phosphorothioate 3'-Internucleotide Linkage
  misc_feature (22)..(22): Phosphorothioate 3'-Internucleotide Linkage
  misc_feature (24)..(25): Phosphorothioate 3'-Internucleotide Linkage
  misc_feature (28)..(28): Phosphorothioate 3'-Internucleotide Linkage
  misc_feature (30)..(30): Phosphorothioate 3'-Internucleotide Linkage
aggagacagccgaaaggcgagucaaggucuaaagguuc

SEQ ID NO: 4294 - RNA, 38 nt, Artificial Sequence
  Description of Artificial Sequence:  Enzymatic Nucleic Acid
  misc_feature (11)..(16): Phosphorothioate 3'-Internucleotide Linkage
  misc_feature (20)..(20): Phosphorothioate 3'-Internucleotide Linkage
  misc_feature (22)..(22): Phosphorothioate 3'-Internucleotide Linkage
  misc_feature (24)..(25): Phosphorothioate 3'-Internucleotide Linkage
  misc_feature (28)..(28): Phosphorothioate 3'-Internucleotide Linkage
  misc_feature (30)..(30): Phosphorothioate 3'-Internucleotide Linkage
agaggagagccgaaaggcgagucaaggucuacaaaggu

SEQ ID NO: 4295 - RNA, 38 nt, Artificial Sequence
  Description of Artificial Sequence:  Enzymatic Nucleic Acid
  misc_feature (11)..(16): Phosphorothioate 3'-Internucleotide Linkage
  misc_feature (20)..(20): Phosphorothioate 3'-Internucleotide Linkage
  misc_feature (22)..(22): Phosphorothioate 3'-Internucleotide Linkage
  misc_feature (24)..(25): Phosphorothioate 3'-Internucleotide Linkage
  misc_feature (28)..(28): Phosphorothioate 3'-Internucleotide Linkage
  misc_feature (30)..(30): Phosphorothioate 3'-Internucleotide Linkage
gagcaaaagccgaaaggcgagucaaggucuaagcggcu

SEQ ID NO: 4296 - RNA, 38 nt, Artificial Sequence
  Description of Artificial Sequence:  Enzymatic Nucleic Acid
  misc_feature (11)..(16): Phosphorothioate 3'-Internucleotide Linkage
  misc_feature (20)..(20): Phosphorothioate 3'-Internucleotide Linkage
  misc_feature (22)..(22): Phosphorothioate 3'-Internucleotide Linkage
  misc_feature (24)..(25): Phosphorothioate 3'-Internucleotide Linkage
  misc_feature (28)..(28): Phosphorothioate 3'-Internucleotide Linkage
  misc_feature (30)..(30): Phosphorothioate 3'-Internucleotide Linkage
gagcacgagccgaaaggcgagucaaggucuagaauugu

SEQ ID NO: 4297 - RNA, 38 nt, Artificial Sequence
  Description of Artificial Sequence:  Enzymatic Nucleic Acid
  misc_feature (11)..(16): Phosphorothioate 3'-Internucleotide Linkage
  misc_feature (20)..(20): Phosphorothioate 3'-Internucleotide Linkage
  misc_feature (22)..(22): Phosphorothioate 3'-Internucleotide Linkage
  misc_feature (24)..(25): Phosphorothioate 3'-Internucleotide Linkage
  misc_feature (28)..(28): Phosphorothioate 3'-Internucleotide Linkage
  misc_feature (30)..(30): Phosphorothioate 3'-Internucleotide Linkage
uggcagcagccgaaaggcgagucaaggucuagccuagc

SEQ ID NO: 4298 - RNA, 38 nt, Artificial Sequence
  Description of Artificial Sequence:  Enzymatic Nucleic Acid
  misc_feature (11)..(16): Phosphorothioate 3'-Internucleotide Linkage
  misc_feature (20)..(20): Phosphorothioate 3'-Internucleotide Linkage
  misc_feature (22)..(22): Phosphorothioate 3'-Internucleotide Linkage
  misc_feature (24)..(25): Phosphorothioate 3'-Internucleotide Linkage
  misc_feature (28)..(28): Phosphorothioate 3'-Internucleotide Linkage
  misc_feature (30)..(30): Phosphorothioate 3'-Internucleotide Linkage
gacguaaagccgaaaggcgagucaaggucuaaaggacg

SEQ ID NO: 4299 - RNA, 38 nt, Artificial Sequence
  Description of Artificial Sequence:  Enzymatic Nucleic Acid
  misc_feature (11)..(16): Phosphorothioate 3'-Internucleotide Linkage
  misc_feature (20)..(20): Phosphorothioate 3'-Internucleotide Linkage
  misc_feature (22)..(22): Phosphorothioate 3'-Internucleotide Linkage
  misc_feature (24)..(25): Phosphorothioate 3'-Internucleotide Linkage
  misc_feature (28)..(28): Phosphorothioate 3'-Internucleotide Linkage
  misc_feature (30)..(30): Phosphorothioate 3'-Internucleotide Linkage
ggucgguagccgaaaggcgagucaaggucuaauaggcg

SEQ ID NO: 4300 - RNA, 38 nt, Artificial Sequence
  Description of Artificial Sequence:  Enzymatic Nucleic Acid
  misc_feature (11)..(16): Phosphorothioate 3'-Internucleotide Linkage
  misc_feature (20)..(20): Phosphorothioate 3'-Internucleotide Linkage
  misc_feature (22)..(22): Phosphorothioate 3'-Internucleotide Linkage
  misc_feature (24)..(25): Phosphorothioate 3'-Internucleotide Linkage
  misc_feature (28)..(28): Phosphorothioate 3'-Internucleotide Linkage
  misc_feature (30)..(30): Phosphorothioate 3'-Internucleotide Linkage
agaaggcagccgaaaggcgagucaaggucuagacgggg

SEQ ID NO: 4301 - RNA, 38 nt, Artificial Sequence
  Description of Artificial Sequence:  Enzymatic Nucleic Acid
  misc_feature (11)..(16): Phosphorothioate 3'-Internucleotide Linkage
  misc_feature (20)..(20): Phosphorothioate 3'-Internucleotide Linkage
  misc_feature (22)..(22): Phosphorothioate 3'-Internucleotide Linkage
  misc_feature (24)..(25): Phosphorothioate 3'-Internucleotide Linkage
  misc_feature (28)..(28): Phosphorothioate 3'-Internucleotide Linkage
  misc_feature (30)..(30): Phosphorothioate 3'-Internucleotide Linkage
gaagugcagccgaaaggcgagucaaggucuacgguccg

SEQ ID NO: 4302 - RNA, 38 nt, Artificial Sequence
  Description of Artificial Sequence:  Enzymatic Nucleic Acid
  misc_feature (11)..(16): Phosphorothioate 3'-Internucleotide Linkage
  misc_feature (20)..(20): Phosphorothioate 3'-Internucleotide Linkage
  misc_feature (22)..(22): Phosphorothioate 3'-Internucleotide Linkage
  misc_feature (24)..(25): Phosphorothioate 3'-Internucleotide Linkage
  misc_feature (28)..(28): Phosphorothioate 3'-Internucleotide Linkage
  misc_feature (30)..(30): Phosphorothioate 3'-Internucleotide Linkage
gucguugagccgaaaggcgagucaaggucuauugcuga

SEQ ID NO: 4303 - RNA, 38 nt, Artificial Sequence
  Description of Artificial Sequence:  Enzymatic Nucleic Acid
  misc_feature (11)..(16): Phosphorothioate 3'-Internucleotide Linkage
  misc_feature (20)..(20): Phosphorothioate 3'-Internucleotide Linkage
  misc_feature (22)..(22): Phosphorothioate 3'-Internucleotide Linkage
  misc_feature (24)..(25): Phosphorothioate 3'-Internucleotide Linkage
  misc_feature (28)..(28): Phosphorothioate 3'-Internucleotide Linkage
  misc_feature (30)..(30): Phosphorothioate 3'-Internucleotide Linkage
uaaacacagccgaaaggcgagucaaggucuagucuuug

SEQ ID NO: 4304 - RNA, 38 nt, Artificial Sequence
  Description of Artificial Sequence:  Enzymatic Nucleic Acid
  misc_feature (11)..(16): Phosphorothioate 3'-Internucleotide Linkage
  misc_feature (20)..(20): Phosphorothioate 3'-Internucleotide Linkage
  misc_feature (22)..(22): Phosphorothioate 3'-Internucleotide Linkage
  misc_feature (24)..(25): Phosphorothioate 3'-Internucleotide Linkage
  misc_feature (28)..(28): Phosphorothioate 3'-Internucleotide Linkage
  misc_feature (30)..(30): Phosphorothioate 3'-Internucleotide Linkage
auuaaacagccgaaaggcgagucaaggucuacagucuu

SEQ ID NO: 4305 - RNA, 38 nt, Artificial Sequence
  Description of Artificial Sequence:  Enzymatic Nucleic Acid
  misc_feature (11)..(16): Phosphorothioate 3'-Internucleotide Linkage
  misc_feature (20)..(20): Phosphorothioate 3'-Internucleotide Linkage
  misc_feature (22)..(22): Phosphorothioate 3'-Internucleotide Linkage
  misc_feature (24)..(25): Phosphorothioate 3'-Internucleotide Linkage
  misc_feature (28)..(28): Phosphorothioate 3'-Internucleotide Linkage
  misc_feature (30)..(30): Phosphorothioate 3'-Internucleotide Linkage
ucauuaaagccgaaaggcgagucaaggucuacacaguc

SEQ ID NO: 4306 - RNA, 38 nt, Artificial Sequence
  Description of Artificial Sequence:  Enzymatic Nucleic Acid
  misc_feature (11)..(16): Phosphorothioate 3'-Internucleotide Linkage
  misc_feature (20)..(20): Phosphorothioate 3'-Internucleotide Linkage
  misc_feature (22)..(22): Phosphorothioate 3'-Internucleotide Linkage
  misc_feature (24)..(25): Phosphorothioate 3'-Internucleotide Linkage
  misc_feature (28)..(28): Phosphorothioate 3'-Internucleotide Linkage
  misc_feature (30)..(30): Phosphorothioate 3'-Internucleotide Linkage
uccuaguagccgaaaggcgagucaaggucuaaagaccu

SEQ ID NO: 4307 - RNA, 38 nt, Artificial Sequence
  Description of Artificial Sequence:  Enzymatic Nucleic Acid
  misc_feature (11)..(16): Phosphorothioate 3'-Internucleotide Linkage
  misc_feature (20)..(20): Phosphorothioate 3'-Internucleotide Linkage
  misc_feature (22)..(22): Phosphorothioate 3'-Internucleotide Linkage
  misc_feature (24)..(25): Phosphorothioate 3'-Internucleotide Linkage
  misc_feature (28)..(28): Phosphorothioate 3'-Internucleotide Linkage
  misc_feature (30)..(30): Phosphorothioate 3'-Internucleotide Linkage
uaugccuagccgaaaggcgagucaaggucuagccuccu

SEQ ID NO: 4308 - RNA, 38 nt, Artificial Sequence
  Description of Artificial Sequence:  Enzymatic Nucleic Acid
  misc_feature (11)..(16): Phosphorothioate 3'-Internucleotide Linkage
  misc_feature (20)..(20): Phosphorothioate 3'-Internucleotide Linkage
  misc_feature (22)..(22): Phosphorothioate 3'-Internucleotide Linkage
  misc_feature (24)..(25): Phosphorothioate 3'-Internucleotide Linkage
  misc_feature (28)..(28): Phosphorothioate 3'-Internucleotide Linkage
  misc_feature (30)..(30): Phosphorothioate 3'-Internucleotide Linkage
ggugaacagccgaaaggcgagucaaggucuaccaauuu

SEQ ID NO: 4309 - RNA, 38 nt, Artificial Sequence
  Description of Artificial Sequence:  Enzymatic Nucleic Acid
  misc_feature (11)..(16): Phosphorothioate 3'-Internucleotide Linkage
  misc_feature (20)..(20): Phosphorothioate 3'-Internucleotide Linkage
  misc_feature (22)..(22): Phosphorothioate 3'-Internucleotide Linkage
  misc_feature (24)..(25): Phosphorothioate 3'-Internucleotide Linkage
  misc_feature (28)..(28): Phosphorothioate 3'-Internucleotide Linkage
  misc_feature (30)..(30): Phosphorothioate 3'-Internucleotide Linkage
cuggugaagccgaaaggcgagucaaggucuacaccaau

SEQ ID NO: 4310 - RNA, 38 nt, Artificial Sequence
  Description of Artificial Sequence:  Enzymatic Nucleic Acid
  misc_feature (11)..(16): Phosphorothioate 3'-Internucleotide Linkage
  misc_feature (20)..(20): Phosphorothioate 3'-Internucleotide Linkage
  misc_feature (22)..(22): Phosphorothioate 3'-Internucleotide Linkage
  misc_feature (24)..(25): Phosphorothioate 3'-Internucleotide Linkage
  misc_feature (28)..(28): Phosphorothioate 3'-Internucleotide Linkage
  misc_feature (30)..(30): Phosphorothioate 3'-Internucleotide Linkage
gacaugaagccgaaaggcgagucaaggucuaugagaug

SEQ ID NO: 4311 - RNA, 38 nt, Artificial Sequence
  Description of Artificial Sequence:  Enzymatic Nucleic Acid
  misc_feature (11)..(16): Phosphorothioate 3'-Internucleotide Linkage
  misc_feature (20)..(20): Phosphorothioate 3'-Internucleotide Linkage
  misc_feature (22)..(22): Phosphorothioate 3'-Internucleotide Linkage
  misc_feature (24)..(25): Phosphorothioate 3'-Internucleotide Linkage
  misc_feature (28)..(28): Phosphorothioate 3'-Internucleotide Linkage
  misc_feature (30)..(30): Phosphorothioate 3'-Internucleotide Linkage
caguaggagccgaaaggcgagucaaggucuaugaacau

SEQ ID NO: 4312 - RNA, 38 nt, Artificial Sequence
  Description of Artificial Sequence:  Enzymatic Nucleic Acid
  misc_feature (11)..(16): Phosphorothioate 3'-Internucleotide Linkage
  misc_feature (20)..(20): Phosphorothioate 3'-Internucleotide Linkage
  misc_feature (22)..(22): Phosphorothioate 3'-Internucleotide Linkage
  misc_feature (24)..(25): Phosphorothioate 3'-Internucleotide Linkage
  misc_feature (28)..(28): Phosphorothioate 3'-Internucleotide Linkage
  misc_feature (30)..(30): Phosphorothioate 3'-Internucleotide Linkage
ggcuugaagccgaaaggcgagucaaggucuaguaggac

SEQ ID NO: 4313 - RNA, 38 nt, Artificial Sequence
  Description of Artificial Sequence:  Enzymatic Nucleic Acid
  misc_feature (11)..(16): Phosphorothioate 3'-Internucleotide Linkage
  misc_feature (20)..(20): Phosphorothioate 3'-Internucleotide Linkage
  misc_feature (22)..(22): Phosphorothioate 3'-Internucleotide Linkage
  misc_feature (24)..(25): Phosphorothioate 3'-Internucleotide Linkage
  misc_feature (28)..(28): Phosphorothioate 3'-Internucleotide Linkage
  misc_feature (30)..(30): Phosphorothioate 3'-Internucleotide Linkage
ccaaggcagccgaaaggcgagucaaggucuagcuugga

SEQ ID NO: 4314 - RNA, 38 nt, Artificial Sequence
  Description of Artificial Sequence:  Enzymatic Nucleic Acid
  misc_feature (11)..(16): Phosphorothioate 3'-Internucleotide Linkage
  misc_feature (20)..(20): Phosphorothioate 3'-Internucleotide Linkage
  misc_feature (22)..(22): Phosphorothioate 3'-Internucleotide Linkage
  misc_feature (24)..(25): Phosphorothioate 3'-Internucleotide Linkage
  misc_feature (28)..(28): Phosphorothioate 3'-Internucleotide Linkage
  misc_feature (30)..(30): Phosphorothioate 3'-Internucleotide Linkage
uaacuccagccgaaaggcgagucaaggucuagaagcuc

SEQ ID NO: 4315 - RNA, 38 nt, Artificial Sequence
  Description of Artificial Sequence:  Enzymatic Nucleic Acid
  misc_feature (11)..(16): Phosphorothioate 3'-Internucleotide Linkage
  misc_feature (20)..(20): Phosphorothioate 3'-Internucleotide Linkage
  misc_feature (22)..(22): Phosphorothioate 3'-Internucleotide Linkage
  misc_feature (24)..(25): Phosphorothioate 3'-Internucleotide Linkage
  misc_feature (28)..(28): Phosphorothioate 3'-Internucleotide Linkage
  misc_feature (30)..(30): Phosphorothioate 3'-Internucleotide Linkage
ccccgauagccgaaaggcgagucaaggucuagagcaga

SEQ ID NO: 4316 - RNA, 38 nt, Artificial Sequence
  Description of Artificial Sequence:  Enzymatic Nucleic Acid
  misc_feature (11)..(16): Phosphorothioate 3'-Internucleotide Linkage
  misc_feature (20)..(20): Phosphorothioate 3'-Internucleotide Linkage
  misc_feature (22)..(22): Phosphorothioate 3'-Internucleotide Linkage
  misc_feature (24)..(25): Phosphorothioate 3'-Internucleotide Linkage
  misc_feature (28)..(28): Phosphorothioate 3'-Internucleotide Linkage
  misc_feature (30)..(30): Phosphorothioate 3'-Internucleotide Linkage
gaggugaagccgaaaggcgagucaaggucuaauguucc

SEQ ID NO: 4317 - RNA, 38 nt, Artificial Sequence
  Description of Artificial Sequence:  Enzymatic Nucleic Acid
  misc_feature (11)..(16): Phosphorothioate 3'-Internucleotide Linkage
  misc_feature (20)..(20): Phosphorothioate 3'-Internucleotide Linkage
  misc_feature (22)..(22): Phosphorothioate 3'-Internucleotide Linkage
  misc_feature (24)..(25): Phosphorothioate 3'-Internucleotide Linkage
  misc_feature (28)..(28): Phosphorothioate 3'-Internucleotide Linkage
  misc_feature (30)..(30): Phosphorothioate 3'-Internucleotide Linkage
ccccaacagccgaaaggcgagucaaggucuagaauagc

SEQ ID NO: 4318 - RNA, 38 nt, Artificial Sequence
  Description of Artificial Sequence:  Enzymatic Nucleic Acid
  misc_feature (11)..(16): Phosphorothioate 3'-Internucleotide Linkage
  misc_feature (20)..(20): Phosphorothioate 3'-Internucleotide Linkage
  misc_feature (22)..(22): Phosphorothioate 3'-Internucleotide Linkage
  misc_feature (24)..(25): Phosphorothioate 3'-Internucleotide Linkage
  misc_feature (28)..(28): Phosphorothioate 3'-Internucleotide Linkage
  misc_feature (30)..(30): Phosphorothioate 3'-Internucleotide Linkage
caccccaagccgaaaggcgagucaaggucuacagaaua

SEQ ID NO: 4319 - RNA, 38 nt, Artificial Sequence
  Description of Artificial Sequence:  Enzymatic Nucleic Acid
  misc_feature (11)..(16): Phosphorothioate 3'-Internucleotide Linkage
  misc_feature (20)..(20): Phosphorothioate 3'-Internucleotide Linkage
  misc_feature (22)..(22): Phosphorothioate 3'-Internucleotide Linkage
  misc_feature (24)..(25): Phosphorothioate 3'-Internucleotide Linkage
  misc_feature (28)..(28): Phosphorothioate 3'-Internucleotide Linkage
  misc_feature (30)..(30): Phosphorothioate 3'-Internucleotide Linkage
aacguugagccgaaaggcgagucaaggucuauagcuga

SEQ ID NO: 4320 - RNA, 38 nt, Artificial Sequence
  Description of Artificial Sequence:  Enzymatic Nucleic Acid
  misc_feature (11)..(16): Phosphorothioate 3'-Internucleotide Linkage
  misc_feature (20)..(20): Phosphorothioate 3'-Internucleotide Linkage
  misc_feature (22)..(22): Phosphorothioate 3'-Internucleotide Linkage
  misc_feature (24)..(25): Phosphorothioate 3'-Internucleotide Linkage
  misc_feature (28)..(28): Phosphorothioate 3'-Internucleotide Linkage
  misc_feature (30)..(30): Phosphorothioate 3'-Internucleotide Linkage
ugaaaccagccgaaaggcgagucaaggucuaauaguug

SEQ ID NO: 4321 - RNA, 38 nt, Artificial Sequence
  Description of Artificial Sequence:  Enzymatic Nucleic Acid
  misc_feature (11)..(16): Phosphorothioate 3'-Internucleotide Linkage
  misc_feature (20)..(20): Phosphorothioate 3'-Internucleotide Linkage
  misc_feature (22)..(22): Phosphorothioate 3'-Internucleotide Linkage
  misc_feature (24)..(25): Phosphorothioate 3'-Internucleotide Linkage
  misc_feature (28)..(28): Phosphorothioate 3'-Internucleotide Linkage
  misc_feature (30)..(30): Phosphorothioate 3'-Internucleotide Linkage
aaguaagagccgaaaggcgagucaaggucuaggaaaug

SEQ ID NO: 4322 - RNA, 38 nt, Artificial Sequence
  Description of Artificial Sequence:  Enzymatic Nucleic Acid
  misc_feature (11)..(16): Phosphorothioate 3'-Internucleotide Linkage
  misc_feature (20)..(20): Phosphorothioate 3'-Internucleotide Linkage
  misc_feature (22)..(22): Phosphorothioate 3'-Internucleotide Linkage
  misc_feature (24)..(25): Phosphorothioate 3'-Internucleotide Linkage
  misc_feature (28)..(28): Phosphorothioate 3'-Internucleotide Linkage
  misc_feature (30)..(30): Phosphorothioate 3'-Internucleotide Linkage
uucaagaagccgaaaggcgagucaaggucuaguuucuc

SEQ ID NO: 4323 - RNA, 38 nt, Artificial Sequence
  Description of Artificial Sequence:  Enzymatic Nucleic Acid
  misc_feature (11)..(16): Phosphorothioate 3'-Internucleotide Linkage
  misc_feature (20)..(20): Phosphorothioate 3'-Internucleotide Linkage
  misc_feature (22)..(22): Phosphorothioate 3'-Internucleotide Linkage
  misc_feature (24)..(25): Phosphorothioate 3'-Internucleotide Linkage
  misc_feature (28)..(28): Phosphorothioate 3'-Internucleotide Linkage
  misc_feature (30)..(30): Phosphorothioate 3'-Internucleotide Linkage
ccaaaagagccgaaaggcgagucaaggucuaccaaaua

SEQ ID NO: 4324 - RNA, 38 nt, Artificial Sequence
  Description of Artificial Sequence:  Enzymatic Nucleic Acid
  misc_feature (11)..(16): Phosphorothioate 3'-Internucleotide Linkage
  misc_feature (20)..(20): Phosphorothioate 3'-Internucleotide Linkage
  misc_feature (22)..(22): Phosphorothioate 3'-Internucleotide Linkage
  misc_feature (24)..(25): Phosphorothioate 3'-Internucleotide Linkage
  misc_feature (28)..(28): Phosphorothioate 3'-Internucleotide Linkage
  misc_feature (30)..(30): Phosphorothioate 3'-Internucleotide Linkage
cgaauccagccgaaaggcgagucaaggucuacuccaaa

SEQ ID NO: 4325 - RNA, 38 nt, Artificial Sequence
  Description of Artificial Sequence:  Enzymatic Nucleic Acid
  misc_feature (11)..(16): Phosphorothioate 3'-Internucleotide Linkage
  misc_feature (20)..(20): Phosphorothioate 3'-Internucleotide Linkage
  misc_feature (22)..(22): Phosphorothioate 3'-Internucleotide Linkage
  misc_feature (24)..(25): Phosphorothioate 3'-Internucleotide Linkage
  misc_feature (28)..(28): Phosphorothioate 3'-Internucleotide Linkage
  misc_feature (30)..(30): Phosphorothioate 3'-Internucleotide Linkage
ucuaacaagccgaaaggcgagucaaggucuaguaguuu

SEQ ID NO: 4326 - RNA, 38 nt, Artificial Sequence
  Description of Artificial Sequence:  Enzymatic Nucleic Acid
  misc_feature (11)..(16): Phosphorothioate 3'-Internucleotide Linkage
  misc_feature (20)..(20): Phosphorothioate 3'-Internucleotide Linkage
  misc_feature (22)..(22): Phosphorothioate 3'-Internucleotide Linkage
  misc_feature (24)..(25): Phosphorothioate 3'-Internucleotide Linkage
  misc_feature (28)..(28): Phosphorothioate 3'-Internucleotide Linkage
  misc_feature (30)..(30): Phosphorothioate 3'-Internucleotide Linkage
ucgucuaagccgaaaggcgagucaaggucuaacaguag

SEQ ID NO: 4327 - RNA, 38 nt, Artificial Sequence
  Description of Artificial Sequence:  Enzymatic Nucleic Acid
  misc_feature (11)..(16): Phosphorothioate 3'-Internucleotide Linkage
  misc_feature (20)..(20): Phosphorothioate 3'-Internucleotide Linkage
  misc_feature (22)..(22): Phosphorothioate 3'-Internucleotide Linkage
  misc_feature (24)..(25): Phosphorothioate 3'-Internucleotide Linkage
  misc_feature (28)..(28): Phosphorothioate 3'-Internucleotide Linkage
  misc_feature (30)..(30): Phosphorothioate 3'-Internucleotide Linkage
aauacuaagccgaaaggcgagucaaggucuauugagau

SEQ ID NO: 4328 - RNA, 38 nt, Artificial Sequence
  Description of Artificial Sequence:  Enzymatic Nucleic Acid
  misc_feature (11)..(16): Phosphorothioate 3'-Internucleotide Linkage
  misc_feature (20)..(20): Phosphorothioate 3'-Internucleotide Linkage
  misc_feature (22)..(22): Phosphorothioate 3'-Internucleotide Linkage
  misc_feature (24)..(25): Phosphorothioate 3'-Internucleotide Linkage
  misc_feature (28)..(28): Phosphorothioate 3'-Internucleotide Linkage
  misc_feature (30)..(30): Phosphorothioate 3'-Internucleotide Linkage
ucuaucaagccgaaaggcgagucaaggucuaauguccu

SEQ ID NO: 4329 - RNA, 38 nt, Artificial Sequence
  Description of Artificial Sequence:  Enzymatic Nucleic Acid
  misc_feature (11)..(16): Phosphorothioate 3'-Internucleotide Linkage
  misc_feature (20)..(20): Phosphorothioate 3'-Internucleotide Linkage
  misc_feature (22)..(22): Phosphorothioate 3'-Internucleotide Linkage
  misc_feature (24)..(25): Phosphorothioate 3'-Internucleotide Linkage
  misc_feature (28)..(28): Phosphorothioate 3'-Internucleotide Linkage
  misc_feature (30)..(30): Phosphorothioate 3'-Internucleotide Linkage
auugcuuagccgaaaggcgagucaaggucuaucuauca

SEQ ID NO: 4330 - RNA, 38 nt, Artificial Sequence
  Description of Artificial Sequence:  Enzymatic Nucleic Acid
  misc_feature (11)..(16): Phosphorothioate 3'-Internucleotide Linkage
  misc_feature (20)..(20): Phosphorothioate 3'-Internucleotide Linkage
  misc_feature (22)..(22): Phosphorothioate 3'-Internucleotide Linkage
  misc_feature (24)..(25): Phosphorothioate 3'-Internucleotide Linkage
  misc_feature (28)..(28): Phosphorothioate 3'-Internucleotide Linkage
  misc_feature (30)..(30): Phosphorothioate 3'-Internucleotide Linkage
gggccccagccgaaaggcgagucaaggucuaaauugcu

SEQ ID NO: 4331 - RNA, 38 nt, Artificial Sequence
  Description of Artificial Sequence:  Enzymatic Nucleic Acid
  misc_feature (11)..(16): Phosphorothioate 3'-Internucleotide Linkage
  misc_feature (20)..(20): Phosphorothioate 3'-Internucleotide Linkage
  misc_feature (22)..(22): Phosphorothioate 3'-Internucleotide Linkage
  misc_feature (24)..(25): Phosphorothioate 3'-Internucleotide Linkage
  misc_feature (28)..(28): Phosphorothioate 3'-Internucleotide Linkage
  misc_feature (30)..(30): Phosphorothioate 3'-Internucleotide Linkage
uuuaguaagccgaaaggcgagucaaggucuauugggau

SEQ ID NO: 4332 - RNA, 38 nt, Artificial Sequence
  Description of Artificial Sequence:  Enzymatic Nucleic Acid
  misc_feature (11)..(16): Phosphorothioate 3'-Internucleotide Linkage
  misc_feature (20)..(20): Phosphorothioate 3'-Internucleotide Linkage
  misc_feature (22)..(22): Phosphorothioate 3'-Internucleotide Linkage
  misc_feature (24)..(25): Phosphorothioate 3'-Internucleotide Linkage
  misc_feature (28)..(28): Phosphorothioate 3'-Internucleotide Linkage
  misc_feature (30)..(30): Phosphorothioate 3'-Internucleotide Linkage
auuaacuagccgaaaggcgagucaaggucuauacucug

SEQ ID NO: 4333 - RNA, 38 nt, Artificial Sequence
  Description of Artificial Sequence:  Enzymatic Nucleic Acid
  misc_feature (11)..(16): Phosphorothioate 3'-Internucleotide Linkage
  misc_feature (20)..(20): Phosphorothioate 3'-Internucleotide Linkage
  misc_feature (22)..(22): Phosphorothioate 3'-Internucleotide Linkage
  misc_feature (24)..(25): Phosphorothioate 3'-Internucleotide Linkage
  misc_feature (28)..(28): Phosphorothioate 3'-Internucleotide Linkage
  misc_feature (30)..(30): Phosphorothioate 3'-Internucleotide Linkage
auuggggagccgaaaggcgagucaaggucuagaaagau

SEQ ID NO: 4334 - RNA, 38 nt, Artificial Sequence
  Description of Artificial Sequence:  Enzymatic Nucleic Acid
  misc_feature (11)..(16): Phosphorothioate 3'-Internucleotide Linkage
  misc_feature (20)..(20): Phosphorothioate 3'-Internucleotide Linkage
  misc_feature (22)..(22): Phosphorothioate 3'-Internucleotide Linkage
  misc_feature (24)..(25): Phosphorothioate 3'-Internucleotide Linkage
  misc_feature (28)..(28): Phosphorothioate 3'-Internucleotide Linkage
  misc_feature (30)..(30): Phosphorothioate 3'-Internucleotide Linkage
caccccaagccgaaaggcgagucaaggucuaguccccc

SEQ ID NO: 4335 - RNA, 38 nt, Artificial Sequence
  Description of Artificial Sequence:  Enzymatic Nucleic Acid
  misc_feature (11)..(16): Phosphorothioate 3'-Internucleotide Linkage
  misc_feature (20)..(20): Phosphorothioate 3'-Internucleotide Linkage
  misc_feature (22)..(22): Phosphorothioate 3'-Internucleotide Linkage
  misc_feature (24)..(25): Phosphorothioate 3'-Internucleotide Linkage
  misc_feature (28)..(28): Phosphorothioate 3'-Internucleotide Linkage
  misc_feature (30)..(30): Phosphorothioate 3'-Internucleotide Linkage
ugcuggcagccgaaaggcgagucaaggucuaguuguga

SEQ ID NO: 4336 - RNA, 38 nt, Artificial Sequence
  Description of Artificial Sequence:  Enzymatic Nucleic Acid
  misc_feature (11)..(16): Phosphorothioate 3'-Internucleotide Linkage
  misc_feature (20)..(20): Phosphorothioate 3'-Internucleotide Linkage
  misc_feature (22)..(22): Phosphorothioate 3'-Internucleotide Linkage
  misc_feature (24)..(25): Phosphorothioate 3'-Internucleotide Linkage
  misc_feature (28)..(28): Phosphorothioate 3'-Internucleotide Linkage
  misc_feature (30)..(30): Phosphorothioate 3'-Internucleotide Linkage
ggcccugagccgaaaggcgagucaaggucuucugggau

SEQ ID NO: 4337 - RNA, 38 nt, Artificial Sequence
  Description of Artificial Sequence:  Enzymatic Nucleic Acid
  misc_feature (11)..(16): Phosphorothioate 3'-Internucleotide Linkage
  misc_feature (20)..(20): Phosphorothioate 3'-Internucleotide Linkage
  misc_feature (22)..(22): Phosphorothioate 3'-Internucleotide Linkage
  misc_feature (24)..(25): Phosphorothioate 3'-Internucleotide Linkage
  misc_feature (28)..(28): Phosphorothioate 3'-Internucleotide Linkage
  misc_feature (30)..(30): Phosphorothioate 3'-Internucleotide Linkage
guacaggggccgaaaggcgagucaaggucuccugacuc

SEQ ID NO: 4338 - RNA, 38 nt, Artificial Sequence
  Description of Artificial Sequence:  Enzymatic Nucleic Acid
  misc_feature (11)..(16): Phosphorothioate 3'-Internucleotide Linkage
  misc_feature (20)..(20): Phosphorothioate 3'-Internucleotide Linkage
  misc_feature (22)..(22): Phosphorothioate 3'-Internucleotide Linkage
  misc_feature (24)..(25): Phosphorothioate 3'-Internucleotide Linkage
  misc_feature (28)..(28): Phosphorothioate 3'-Internucleotide Linkage
  misc_feature (30)..(30): Phosphorothioate 3'-Internucleotide Linkage
uggagccagccgaaaggcgagucaaggucucagcagga

SEQ ID NO: 4339 - RNA, 38 nt, Artificial Sequence
  Description of Artificial Sequence:  Enzymatic Nucleic Acid
  misc_feature (11)..(16): Phosphorothioate 3'-Internucleotide Linkage
  misc_feature (20)..(20): Phosphorothioate 3'-Internucleotide Linkage
  misc_feature (22)..(22): Phosphorothioate 3'-Internucleotide Linkage
  misc_feature (24)..(25): Phosphorothioate 3'-Internucleotide Linkage
  misc_feature (28)..(28): Phosphorothioate 3'-Internucleotide Linkage
  misc_feature (30)..(30): Phosphorothioate 3'-Internucleotide Linkage
aacuggaggccgaaaggcgagucaaggucucaccagca

SEQ ID NO: 4340 - RNA, 38 nt, Artificial Sequence
  Description of Artificial Sequence:  Enzymatic Nucleic Acid
  misc_feature (11)..(16): Phosphorothioate 3'-Internucleotide Linkage
  misc_feature (20)..(20): Phosphorothioate 3'-Internucleotide Linkage
  misc_feature (22)..(22): Phosphorothioate 3'-Internucleotide Linkage
  misc_feature (24)..(25): Phosphorothioate 3'-Internucleotide Linkage
  misc_feature (28)..(28): Phosphorothioate 3'-Internucleotide Linkage
  misc_feature (30)..(30): Phosphorothioate 3'-Internucleotide Linkage
uuccugaagccgaaaggcgagucaaggucuuggagcca

SEQ ID NO: 4341 - RNA, 38 nt, Artificial Sequence
  Description of Artificial Sequence:  Enzymatic Nucleic Acid
  misc_feature (11)..(16): Phosphorothioate 3'-Internucleotide Linkage
  misc_feature (20)..(20): Phosphorothioate 3'-Internucleotide Linkage
  misc_feature (22)..(22): Phosphorothioate 3'-Internucleotide Linkage
  misc_feature (24)..(25): Phosphorothioate 3'-Internucleotide Linkage
  misc_feature (28)..(28): Phosphorothioate 3'-Internucleotide Linkage
  misc_feature (30)..(30): Phosphorothioate 3'-Internucleotide Linkage
agggcucagccgaaaggcgagucaaggucuuguuccug

SEQ ID NO: 4342 - RNA, 38 nt, Artificial Sequence
  Description of Artificial Sequence:  Enzymatic Nucleic Acid
  misc_feature (11)..(16): Phosphorothioate 3'-Internucleotide Linkage
  misc_feature (20)..(20): Phosphorothioate 3'-Internucleotide Linkage
  misc_feature (22)..(22): Phosphorothioate 3'-Internucleotide Linkage
  misc_feature (24)..(25): Phosphorothioate 3'-Internucleotide Linkage
  misc_feature (28)..(28): Phosphorothioate 3'-Internucleotide Linkage
  misc_feature (30)..(30): Phosphorothioate 3'-Internucleotide Linkage
gagcaggggccgaaaggcgagucaaggucuucacuguu

SEQ ID NO: 4343 - RNA, 38 nt, Artificial Sequence
  Description of Artificial Sequence:  Enzymatic Nucleic Acid
  misc_feature (11)..(16): Phosphorothioate 3'-Internucleotide Linkage
  misc_feature (20)..(20): Phosphorothioate 3'-Internucleotide Linkage
  misc_feature (22)..(22): Phosphorothioate 3'-Internucleotide Linkage
  misc_feature (24)..(25): Phosphorothioate 3'-Internucleotide Linkage
  misc_feature (28)..(28): Phosphorothioate 3'-Internucleotide Linkage
  misc_feature (30)..(30): Phosphorothioate 3'-Internucleotide Linkage
aagauugagccgaaaggcgagucaaggucugauauggc

SEQ ID NO: 4344 - RNA, 38 nt, Artificial Sequence
  Description of Artificial Sequence:  Enzymatic Nucleic Acid
  misc_feature (11)..(16): Phosphorothioate 3'-Internucleotide Linkage
  misc_feature (20)..(20): Phosphorothioate 3'-Internucleotide Linkage
  misc_feature (22)..(22): Phosphorothioate 3'-Internucleotide Linkage
  misc_feature (24)..(25): Phosphorothioate 3'-Internucleotide Linkage
  misc_feature (28)..(28): Phosphorothioate 3'-Internucleotide Linkage
  misc_feature (30)..(30): Phosphorothioate 3'-Internucleotide Linkage
cuguaacagccgaaaggcgagucaaggucugagcaggg

SEQ ID NO: 4345 - RNA, 38 nt, Artificial Sequence
  Description of Artificial Sequence:  Enzymatic Nucleic Acid
  misc_feature (11)..(16): Phosphorothioate 3'-Internucleotide Linkage
  misc_feature (20)..(20): Phosphorothioate 3'-Internucleotide Linkage
  misc_feature (22)..(22): Phosphorothioate 3'-Internucleotide Linkage
  misc_feature (24)..(25): Phosphorothioate 3'-Internucleotide Linkage
  misc_feature (28)..(28): Phosphorothioate 3'-Internucleotide Linkage
  misc_feature (30)..(30): Phosphorothioate 3'-Internucleotide Linkage
aaaccccggccgaaaggcgagucaaggucucuguaaca

SEQ ID NO: 4346 - RNA, 38 nt, Artificial Sequence
  Description of Artificial Sequence:  Enzymatic Nucleic Acid
  misc_feature (11)..(16): Phosphorothioate 3'-Internucleotide Linkage
  misc_feature (20)..(20): Phosphorothioate 3'-Internucleotide Linkage
  misc_feature (22)..(22): Phosphorothioate 3'-Internucleotide Linkage
  misc_feature (24)..(25): Phosphorothioate 3'-Internucleotide Linkage
  misc_feature (28)..(28): Phosphorothioate 3'-Internucleotide Linkage
  misc_feature (30)..(30): Phosphorothioate 3'-Internucleotide Linkage
aagaaaaagccgaaaggcgagucaaggucucccgccug

SEQ ID NO: 4347 - RNA, 38 nt, Artificial Sequence
  Description of Artificial Sequence:  Enzymatic Nucleic Acid
  misc_feature (11)..(16): Phosphorothioate 3'-Internucleotide Linkage
  misc_feature (20)..(20): Phosphorothioate 3'-Internucleotide Linkage
  misc_feature (22)..(22): Phosphorothioate 3'-Internucleotide Linkage
  misc_feature (24)..(25): Phosphorothioate 3'-Internucleotide Linkage
  misc_feature (28)..(28): Phosphorothioate 3'-Internucleotide Linkage
  misc_feature (30)..(30): Phosphorothioate 3'-Internucleotide Linkage
agucuagagccgaaaggcgagucaaggucuucuguggu

SEQ ID NO: 4348 - RNA, 38 nt, Artificial Sequence
  Description of Artificial Sequence:  Enzymatic Nucleic Acid
  misc_feature (11)..(16): Phosphorothioate 3'-Internucleotide Linkage
  misc_feature (20)..(20): Phosphorothioate 3'-Internucleotide Linkage
  misc_feature (22)..(22): Phosphorothioate 3'-Internucleotide Linkage
  misc_feature (24)..(25): Phosphorothioate 3'-Internucleotide Linkage
  misc_feature (28)..(28): Phosphorothioate 3'-Internucleotide Linkage
  misc_feature (30)..(30): Phosphorothioate 3'-Internucleotide Linkage
guccaccagccgaaaggcgagucaaggucugagucuag

SEQ ID NO: 4349 - RNA, 38 nt, Artificial Sequence
  Description of Artificial Sequence:  Enzymatic Nucleic Acid
  misc_feature (11)..(16): Phosphorothioate 3'-Internucleotide Linkage
  misc_feature (20)..(20): Phosphorothioate 3'-Internucleotide Linkage
  misc_feature (22)..(22): Phosphorothioate 3'-Internucleotide Linkage
  misc_feature (24)..(25): Phosphorothioate 3'-Internucleotide Linkage
  misc_feature (28)..(28): Phosphorothioate 3'-Internucleotide Linkage
  misc_feature (30)..(30): Phosphorothioate 3'-Internucleotide Linkage
gaaguccagccgaaaggcgagucaaggucucacgaguc

SEQ ID NO: 4350 - RNA, 38 nt, Artificial Sequence
  Description of Artificial Sequence:  Enzymatic Nucleic Acid
  misc_feature (11)..(16): Phosphorothioate 3'-Internucleotide Linkage
  misc_feature (20)..(20): Phosphorothioate 3'-Internucleotide Linkage
  misc_feature (22)..(22): Phosphorothioate 3'-Internucleotide Linkage
  misc_feature (24)..(25): Phosphorothioate 3'-Internucleotide Linkage
  misc_feature (28)..(28): Phosphorothioate 3'-Internucleotide Linkage
  misc_feature (30)..(30): Phosphorothioate 3'-Internucleotide Linkage
aagacacagccgaaaggcgagucaaggucuggguguuc

SEQ ID NO: 4351 - RNA, 38 nt, Artificial Sequence
  Description of Artificial Sequence:  Enzymatic Nucleic Acid
  misc_feature (11)..(16): Phosphorothioate 3'-Internucleotide Linkage
  misc_feature (20)..(20): Phosphorothioate 3'-Internucleotide Linkage
  misc_feature (22)..(22): Phosphorothioate 3'-Internucleotide Linkage
  misc_feature (24)..(25): Phosphorothioate 3'-Internucleotide Linkage
  misc_feature (28)..(28): Phosphorothioate 3'-Internucleotide Linkage
  misc_feature (30)..(30): Phosphorothioate 3'-Internucleotide Linkage
aauuuugggccgaaaggcgagucaaggucucaagacac

SEQ ID NO: 4352 - RNA, 38 nt, Artificial Sequence
  Description of Artificial Sequence:  Enzymatic Nucleic Acid
  misc_feature (11)..(16): Phosphorothioate 3'-Internucleotide Linkage
  misc_feature (20)..(20): Phosphorothioate 3'-Internucleotide Linkage
  misc_feature (22)..(22): Phosphorothioate 3'-Internucleotide Linkage
  misc_feature (24)..(25): Phosphorothioate 3'-Internucleotide Linkage
  misc_feature (28)..(28): Phosphorothioate 3'-Internucleotide Linkage
  misc_feature (30)..(30): Phosphorothioate 3'-Internucleotide Linkage
auuugggagccgaaaggcgagucaaggucuugcgaauu

SEQ ID NO: 4353 - RNA, 38 nt, Artificial Sequence
  Description of Artificial Sequence:  Enzymatic Nucleic Acid
  misc_feature (11)..(16): Phosphorothioate 3'-Internucleotide Linkage
  misc_feature (20)..(20): Phosphorothioate 3'-Internucleotide Linkage
  misc_feature (22)..(22): Phosphorothioate 3'-Internucleotide Linkage
  misc_feature (24)..(25): Phosphorothioate 3'-Internucleotide Linkage
  misc_feature (28)..(28): Phosphorothioate 3'-Internucleotide Linkage
  misc_feature (30)..(30): Phosphorothioate 3'-Internucleotide Linkage
gugagugagccgaaaggcgagucaaggucuuggagauu

SEQ ID NO: 4354 - RNA, 38 nt, Artificial Sequence
  Description of Artificial Sequence:  Enzymatic Nucleic Acid
  misc_feature (11)..(16): Phosphorothioate 3'-Internucleotide Linkage
  misc_feature (20)..(20): Phosphorothioate 3'-Internucleotide Linkage
  misc_feature (22)..(22): Phosphorothioate 3'-Internucleotide Linkage
  misc_feature (24)..(25): Phosphorothioate 3'-Internucleotide Linkage
  misc_feature (28)..(28): Phosphorothioate 3'-Internucleotide Linkage
  misc_feature (30)..(30): Phosphorothioate 3'-Internucleotide Linkage
agcgauaagccgaaaggcgagucaaggucucaggacaa

SEQ ID NO: 4355 - RNA, 38 nt, Artificial Sequence
  Description of Artificial Sequence:  Enzymatic Nucleic Acid
  misc_feature (11)..(16): Phosphorothioate 3'-Internucleotide Linkage
  misc_feature (20)..(20): Phosphorothioate 3'-Internucleotide Linkage
  misc_feature (22)..(22): Phosphorothioate 3'-Internucleotide Linkage
  misc_feature (24)..(25): Phosphorothioate 3'-Internucleotide Linkage
  misc_feature (28)..(28): Phosphorothioate 3'-Internucleotide Linkage
  misc_feature (30)..(30): Phosphorothioate 3'-Internucleotide Linkage
auaaaacggccgaaaggcgagucaaggucucgcagaca

SEQ ID NO: 4356 - RNA, 38 nt, Artificial Sequence
  Description of Artificial Sequence:  Enzymatic Nucleic Acid
  misc_feature (11)..(16): Phosphorothioate 3'-Internucleotide Linkage
  misc_feature (20)..(20): Phosphorothioate 3'-Internucleotide Linkage
  misc_feature (22)..(22): Phosphorothioate 3'-Internucleotide Linkage
  misc_feature (24)..(25): Phosphorothioate 3'-Internucleotide Linkage
  misc_feature (28)..(28): Phosphorothioate 3'-Internucleotide Linkage
  misc_feature (30)..(30): Phosphorothioate 3'-Internucleotide Linkage
ugauaaaagccgaaaggcgagucaaggucugccgcaga

SEQ ID NO: 4357 - RNA, 38 nt, Artificial Sequence
  Description of Artificial Sequence:  Enzymatic Nucleic Acid
  misc_feature (11)..(16): Phosphorothioate 3'-Internucleotide Linkage
  misc_feature (20)..(20): Phosphorothioate 3'-Internucleotide Linkage
  misc_feature (22)..(22): Phosphorothioate 3'-Internucleotide Linkage
  misc_feature (24)..(25): Phosphorothioate 3'-Internucleotide Linkage
  misc_feature (28)..(28): Phosphorothioate 3'-Internucleotide Linkage
  misc_feature (30)..(30): Phosphorothioate 3'-Internucleotide Linkage
cagaagaagccgaaaggcgagucaaggucucaacaaga

SEQ ID NO: 4358 - RNA, 38 nt, Artificial Sequence
  Description of Artificial Sequence:  Enzymatic Nucleic Acid
  misc_feature (11)..(16): Phosphorothioate 3'-Internucleotide Linkage
  misc_feature (20)..(20): Phosphorothioate 3'-Internucleotide Linkage
  misc_feature (22)..(22): Phosphorothioate 3'-Internucleotide Linkage
  misc_feature (24)..(25): Phosphorothioate 3'-Internucleotide Linkage
  misc_feature (28)..(28): Phosphorothioate 3'-Internucleotide Linkage
  misc_feature (30)..(30): Phosphorothioate 3'-Internucleotide Linkage
gcaacauagccgaaaggcgagucaaggucucuugauag

SEQ ID NO: 4359 - RNA, 38 nt, Artificial Sequence
  Description of Artificial Sequence:  Enzymatic Nucleic Acid
  misc_feature (11)..(16): Phosphorothioate 3'-Internucleotide Linkage
  misc_feature (20)..(20): Phosphorothioate 3'-Internucleotide Linkage
  misc_feature (22)..(22): Phosphorothioate 3'-Internucleotide Linkage
  misc_feature (24)..(25): Phosphorothioate 3'-Internucleotide Linkage
  misc_feature (28)..(28): Phosphorothioate 3'-Internucleotide Linkage
  misc_feature (30)..(30): Phosphorothioate 3'-Internucleotide Linkage
aggacaaagccgaaaggcgagucaaggucugggcaaca

SEQ ID NO: 4360 - RNA, 38 nt, Artificial Sequence
  Description of Artificial Sequence:  Enzymatic Nucleic Acid
  misc_feature (11)..(16): Phosphorothioate 3'-Internucleotide Linkage
  misc_feature (20)..(20): Phosphorothioate 3'-Internucleotide Linkage
  misc_feature (22)..(22): Phosphorothioate 3'-Internucleotide Linkage
  misc_feature (24)..(25): Phosphorothioate 3'-Internucleotide Linkage
  misc_feature (28)..(28): Phosphorothioate 3'-Internucleotide Linkage
  misc_feature (30)..(30): Phosphorothioate 3'-Internucleotide Linkage
guccgguggccgaaaggcgagucaaggucuugguuguu

SEQ ID NO: 4361 - RNA, 38 nt, Artificial Sequence
  Description of Artificial Sequence:  Enzymatic Nucleic Acid
  misc_feature (11)..(16): Phosphorothioate 3'-Internucleotide Linkage
  misc_feature (20)..(20): Phosphorothioate 3'-Internucleotide Linkage
  misc_feature (22)..(22): Phosphorothioate 3'-Internucleotide Linkage
  misc_feature (24)..(25): Phosphorothioate 3'-Internucleotide Linkage
  misc_feature (28)..(28): Phosphorothioate 3'-Internucleotide Linkage
  misc_feature (30)..(30): Phosphorothioate 3'-Internucleotide Linkage
ugcgaaaggccgaaaggcgagucaaggucuccaagaug

SEQ ID NO: 4362 - RNA, 38 nt, Artificial Sequence
  Description of Artificial Sequence:  Enzymatic Nucleic Acid
  misc_feature (11)..(16): Phosphorothioate 3'-Internucleotide Linkage
  misc_feature (20)..(20): Phosphorothioate 3'-Internucleotide Linkage
  misc_feature (22)..(22): Phosphorothioate 3'-Internucleotide Linkage
  misc_feature (24)..(25): Phosphorothioate 3'-Internucleotide Linkage
  misc_feature (28)..(28): Phosphorothioate 3'-Internucleotide Linkage
  misc_feature (30)..(30): Phosphorothioate 3'-Internucleotide Linkage
gaggcccagccgaaaggcgagucaaggucuucccauag

SEQ ID NO: 4363 - RNA, 38 nt, Artificial Sequence
  Description of Artificial Sequence:  Enzymatic Nucleic Acid
  misc_feature (11)..(16): Phosphorothioate 3'-Internucleotide Linkage
  misc_feature (20)..(20): Phosphorothioate 3'-Internucleotide Linkage
  misc_feature (22)..(22): Phosphorothioate 3'-Internucleotide Linkage
  misc_feature (24)..(25): Phosphorothioate 3'-Internucleotide Linkage
  misc_feature (28)..(28): Phosphorothioate 3'-Internucleotide Linkage
  misc_feature (30)..(30): Phosphorothioate 3'-Internucleotide Linkage
gacugagggccgaaaggcgagucaaggucuccacuccc

SEQ ID NO: 4364 - RNA, 38 nt, Artificial Sequence
  Description of Artificial Sequence:  Enzymatic Nucleic Acid
  misc_feature (11)..(16): Phosphorothioate 3'-Internucleotide Linkage
  misc_feature (20)..(20): Phosphorothioate 3'-Internucleotide Linkage
  misc_feature (22)..(22): Phosphorothioate 3'-Internucleotide Linkage
  misc_feature (24)..(25): Phosphorothioate 3'-Internucleotide Linkage
  misc_feature (28)..(28): Phosphorothioate 3'-Internucleotide Linkage
  misc_feature (30)..(30): Phosphorothioate 3'-Internucleotide Linkage
gaaacggagccgaaaggcgagucaaggucuugaggccc

SEQ ID NO: 4365 - RNA, 38 nt, Artificial Sequence
  Description of Artificial Sequence:  Enzymatic Nucleic Acid
  misc_feature (11)..(16): Phosphorothioate 3'-Internucleotide Linkage
  misc_feature (20)..(20): Phosphorothioate 3'-Internucleotide Linkage
  misc_feature (22)..(22): Phosphorothioate 3'-Internucleotide Linkage
  misc_feature (24)..(25): Phosphorothioate 3'-Internucleotide Linkage
  misc_feature (28)..(28): Phosphorothioate 3'-Internucleotide Linkage
  misc_feature (30)..(30): Phosphorothioate 3'-Internucleotide Linkage
aagagaaagccgaaaggcgagucaaggucuggacugag

SEQ ID NO: 4366 - RNA, 38 nt, Artificial Sequence
  Description of Artificial Sequence:  Enzymatic Nucleic Acid
  misc_feature (11)..(16): Phosphorothioate 3'-Internucleotide Linkage
  misc_feature (20)..(20): Phosphorothioate 3'-Internucleotide Linkage
  misc_feature (22)..(22): Phosphorothioate 3'-Internucleotide Linkage
  misc_feature (24)..(25): Phosphorothioate 3'-Internucleotide Linkage
  misc_feature (28)..(28): Phosphorothioate 3'-Internucleotide Linkage
  misc_feature (30)..(30): Phosphorothioate 3'-Internucleotide Linkage
aaacugaggccgaaaggcgagucaaggucucaagagaa

SEQ ID NO: 4367 - RNA, 38 nt, Artificial Sequence
  Description of Artificial Sequence:  Enzymatic Nucleic Acid
  misc_feature (11)..(16): Phosphorothioate 3'-Internucleotide Linkage
  misc_feature (20)..(20): Phosphorothioate 3'-Internucleotide Linkage
  misc_feature (22)..(22): Phosphorothioate 3'-Internucleotide Linkage
  misc_feature (24)..(25): Phosphorothioate 3'-Internucleotide Linkage
  misc_feature (28)..(28): Phosphorothioate 3'-Internucleotide Linkage
  misc_feature (30)..(30): Phosphorothioate 3'-Internucleotide Linkage
cuaguaaagccgaaaggcgagucaaggucuugagccaa

SEQ ID NO: 4368 - RNA, 38 nt, Artificial Sequence
  Description of Artificial Sequence:  Enzymatic Nucleic Acid
  misc_feature (11)..(16): Phosphorothioate 3'-Internucleotide Linkage
  misc_feature (20)..(20): Phosphorothioate 3'-Internucleotide Linkage
  misc_feature (22)..(22): Phosphorothioate 3'-Internucleotide Linkage
  misc_feature (24)..(25): Phosphorothioate 3'-Internucleotide Linkage
  misc_feature (28)..(28): Phosphorothioate 3'-Internucleotide Linkage
  misc_feature (30)..(30): Phosphorothioate 3'-Internucleotide Linkage
aaauggcagccgaaaggcgagucaaggucuuaguaaac

SEQ ID NO: 4369 - RNA, 38 nt, Artificial Sequence
  Description of Artificial Sequence:  Enzymatic Nucleic Acid
  misc_feature (11)..(16): Phosphorothioate 3'-Internucleotide Linkage
  misc_feature (20)..(20): Phosphorothioate 3'-Internucleotide Linkage
  misc_feature (22)..(22): Phosphorothioate 3'-Internucleotide Linkage
  misc_feature (24)..(25): Phosphorothioate 3'-Internucleotide Linkage
  misc_feature (28)..(28): Phosphorothioate 3'-Internucleotide Linkage
  misc_feature (30)..(30): Phosphorothioate 3'-Internucleotide Linkage
acgaaccagccgaaaggcgagucaaggucuugaacaaa

SEQ ID NO: 4370 - RNA, 38 nt, Artificial Sequence
  Description of Artificial Sequence:  Enzymatic Nucleic Acid
  misc_feature (11)..(16): Phosphorothioate 3'-Internucleotide Linkage
  misc_feature (20)..(20): Phosphorothioate 3'-Internucleotide Linkage
  misc_feature (22)..(22): Phosphorothioate 3'-Internucleotide Linkage
  misc_feature (24)..(25): Phosphorothioate 3'-Internucleotide Linkage
  misc_feature (28)..(28): Phosphorothioate 3'-Internucleotide Linkage
  misc_feature (30)..(30): Phosphorothioate 3'-Internucleotide Linkage
ccuacgaagccgaaaggcgagucaaggucucacugaac

SEQ ID NO: 4371 - RNA, 38 nt, Artificial Sequence
  Description of Artificial Sequence:  Enzymatic Nucleic Acid
  misc_feature (11)..(16): Phosphorothioate 3'-Internucleotide Linkage
  misc_feature (20)..(20): Phosphorothioate 3'-Internucleotide Linkage
  misc_feature (22)..(22): Phosphorothioate 3'-Internucleotide Linkage
  misc_feature (24)..(25): Phosphorothioate 3'-Internucleotide Linkage
  misc_feature (28)..(28): Phosphorothioate 3'-Internucleotide Linkage
  misc_feature (30)..(30): Phosphorothioate 3'-Internucleotide Linkage
aagcccuagccgaaaggcgagucaaggucugaaccacu

SEQ ID NO: 4372 - RNA, 38 nt, Artificial Sequence
  Description of Artificial Sequence:  Enzymatic Nucleic Acid
  misc_feature (11)..(16): Phosphorothioate 3'-Internucleotide Linkage
  misc_feature (20)..(20): Phosphorothioate 3'-Internucleotide Linkage
  misc_feature (22)..(22): Phosphorothioate 3'-Internucleotide Linkage
  misc_feature (24)..(25): Phosphorothioate 3'-Internucleotide Linkage
  misc_feature (28)..(28): Phosphorothioate 3'-Internucleotide Linkage
  misc_feature (30)..(30): Phosphorothioate 3'-Internucleotide Linkage
ggggaaaggccgaaaggcgagucaaggucuccuacgaa

SEQ ID NO: 4373 - RNA, 38 nt, Artificial Sequence
  Description of Artificial Sequence:  Enzymatic Nucleic Acid
  misc_feature (11)..(16): Phosphorothioate 3'-Internucleotide Linkage
  misc_feature (20)..(20): Phosphorothioate 3'-Internucleotide Linkage
  misc_feature (22)..(22): Phosphorothioate 3'-Internucleotide Linkage
  misc_feature (24)..(25): Phosphorothioate 3'-Internucleotide Linkage
  misc_feature (28)..(28): Phosphorothioate 3'-Internucleotide Linkage
  misc_feature (30)..(30): Phosphorothioate 3'-Internucleotide Linkage
acugaaaggccgaaaggcgagucaaggucucagacagu

SEQ ID NO: 4374 - RNA, 38 nt, Artificial Sequence
  Description of Artificial Sequence:  Enzymatic Nucleic Acid
  misc_feature (11)..(16): Phosphorothioate 3'-Internucleotide Linkage
  misc_feature (20)..(20): Phosphorothioate 3'-Internucleotide Linkage
  misc_feature (22)..(22): Phosphorothioate 3'-Internucleotide Linkage
  misc_feature (24)..(25): Phosphorothioate 3'-Internucleotide Linkage
  misc_feature (28)..(28): Phosphorothioate 3'-Internucleotide Linkage
  misc_feature (30)..(30): Phosphorothioate 3'-Internucleotide Linkage
ccauauaagccgaaaggcgagucaaggucuugaaagcc

SEQ ID NO: 4375 - RNA, 38 nt, Artificial Sequence
  Description of Artificial Sequence:  Enzymatic Nucleic Acid
  misc_feature (11)..(16): Phosphorothioate 3'-Internucleotide Linkage
  misc_feature (20)..(20): Phosphorothioate 3'-Internucleotide Linkage
  misc_feature (22)..(22): Phosphorothioate 3'-Internucleotide Linkage
  misc_feature (24)..(25): Phosphorothioate 3'-Internucleotide Linkage
  misc_feature (28)..(28): Phosphorothioate 3'-Internucleotide Linkage
  misc_feature (30)..(30): Phosphorothioate 3'-Internucleotide Linkage
ccccaaaagccgaaaggcgagucaaggucucacaucau

SEQ ID NO: 4376 - RNA, 38 nt, Artificial Sequence
  Description of Artificial Sequence:  Enzymatic Nucleic Acid
  misc_feature (11)..(16): Phosphorothioate 3'-Internucleotide Linkage
  misc_feature (20)..(20): Phosphorothioate 3'-Internucleotide Linkage
  misc_feature (22)..(22): Phosphorothioate 3'-Internucleotide Linkage
  misc_feature (24)..(25): Phosphorothioate 3'-Internucleotide Linkage
  misc_feature (28)..(28): Phosphorothioate 3'-Internucleotide Linkage
  misc_feature (30)..(30): Phosphorothioate 3'-Internucleotide Linkage
agacuugggccgaaaggcgagucaaggucuccccaaaa

SEQ ID NO: 4377 - RNA, 38 nt, Artificial Sequence
  Description of Artificial Sequence:  Enzymatic Nucleic Acid
  misc_feature (11)..(16): Phosphorothioate 3'-Internucleotide Linkage
  misc_feature (20)..(20): Phosphorothioate 3'-Internucleotide Linkage
  misc_feature (22)..(22): Phosphorothioate 3'-Internucleotide Linkage
  misc_feature (24)..(25): Phosphorothioate 3'-Internucleotide Linkage
  misc_feature (28)..(28): Phosphorothioate 3'-Internucleotide Linkage
  misc_feature (30)..(30): Phosphorothioate 3'-Internucleotide Linkage
uguacagagccgaaaggcgagucaaggucuuuggcccc

SEQ ID NO: 4378 - RNA, 38 nt, Artificial Sequence
  Description of Artificial Sequence:  Enzymatic Nucleic Acid
  misc_feature (11)..(16): Phosphorothioate 3'-Internucleotide Linkage
  misc_feature (20)..(20): Phosphorothioate 3'-Internucleotide Linkage
  misc_feature (22)..(22): Phosphorothioate 3'-Internucleotide Linkage
  misc_feature (24)..(25): Phosphorothioate 3'-Internucleotide Linkage
  misc_feature (28)..(28): Phosphorothioate 3'-Internucleotide Linkage
  misc_feature (30)..(30): Phosphorothioate 3'-Internucleotide Linkage
uaaagggagccgaaaggcgagucaaggucuucaagaug

SEQ ID NO: 4379 - RNA, 38 nt, Artificial Sequence
  Description of Artificial Sequence:  Enzymatic Nucleic Acid
  misc_feature (11)..(16): Phosphorothioate 3'-Internucleotide Linkage
  misc_feature (20)..(20): Phosphorothioate 3'-Internucleotide Linkage
  misc_feature (22)..(22): Phosphorothioate 3'-Internucleotide Linkage
  misc_feature (24)..(25): Phosphorothioate 3'-Internucleotide Linkage
  misc_feature (28)..(28): Phosphorothioate 3'-Internucleotide Linkage
  misc_feature (30)..(30): Phosphorothioate 3'-Internucleotide Linkage
aauguauagccgaaaggcgagucaaggucuccaaagac

SEQ ID NO: 4380 - RNA, 38 nt, Artificial Sequence
  Description of Artificial Sequence:  Enzymatic Nucleic Acid
  misc_feature (11)..(16): Phosphorothioate 3'-Internucleotide Linkage
  misc_feature (20)..(20): Phosphorothioate 3'-Internucleotide Linkage
  misc_feature (22)..(22): Phosphorothioate 3'-Internucleotide Linkage
  misc_feature (24)..(25): Phosphorothioate 3'-Internucleotide Linkage
  misc_feature (28)..(28): Phosphorothioate 3'-Internucleotide Linkage
  misc_feature (30)..(30): Phosphorothioate 3'-Internucleotide Linkage
ugccccaagccgaaaggcgagucaaggucuucccaauu

SEQ ID NO: 4381 - RNA, 38 nt, Artificial Sequence
  Description of Artificial Sequence:  Enzymatic Nucleic Acid
  misc_feature (11)..(16): Phosphorothioate 3'-Internucleotide Linkage
  misc_feature (20)..(20): Phosphorothioate 3'-Internucleotide Linkage
  misc_feature (22)..(22): Phosphorothioate 3'-Internucleotide Linkage
  misc_feature (24)..(25): Phosphorothioate 3'-Internucleotide Linkage
  misc_feature (28)..(28): Phosphorothioate 3'-Internucleotide Linkage
  misc_feature (30)..(30): Phosphorothioate 3'-Internucleotide Linkage
gcaauguggccgaaaggcgagucaaggucucccaacuc

SEQ ID NO: 4382 - RNA, 38 nt, Artificial Sequence
  Description of Artificial Sequence:  Enzymatic Nucleic Acid
  misc_feature (11)..(16): Phosphorothioate 3'-Internucleotide Linkage
  misc_feature (20)..(20): Phosphorothioate 3'-Internucleotide Linkage
  misc_feature (22)..(22): Phosphorothioate 3'-Internucleotide Linkage
  misc_feature (24)..(25): Phosphorothioate 3'-Internucleotide Linkage
  misc_feature (28)..(28): Phosphorothioate 3'-Internucleotide Linkage
  misc_feature (30)..(30): Phosphorothioate 3'-Internucleotide Linkage
ucaauagggccgaaaggcgagucaaggucucuguuuac

SEQ ID NO: 4383 - RNA, 38 nt, Artificial Sequence
  Description of Artificial Sequence:  Enzymatic Nucleic Acid
  misc_feature (11)..(16): Phosphorothioate 3'-Internucleotide Linkage
  misc_feature (20)..(20): Phosphorothioate 3'-Internucleotide Linkage
  misc_feature (22)..(22): Phosphorothioate 3'-Internucleotide Linkage
  misc_feature (24)..(25): Phosphorothioate 3'-Internucleotide Linkage
  misc_feature (28)..(28): Phosphorothioate 3'-Internucleotide Linkage
  misc_feature (30)..(30): Phosphorothioate 3'-Internucleotide Linkage
uugacauagccgaaaggcgagucaaggucuuuuccaau

SEQ ID NO: 4384 - RNA, 38 nt, Artificial Sequence
  Description of Artificial Sequence:  Enzymatic Nucleic Acid
  misc_feature (11)..(16): Phosphorothioate 3'-Internucleotide Linkage
  misc_feature (20)..(20): Phosphorothioate 3'-Internucleotide Linkage
  misc_feature (22)..(22): Phosphorothioate 3'-Internucleotide Linkage
  misc_feature (24)..(25): Phosphorothioate 3'-Internucleotide Linkage
  misc_feature (28)..(28): Phosphorothioate 3'-Internucleotide Linkage
  misc_feature (30)..(30): Phosphorothioate 3'-Internucleotide Linkage
ccaaaagagccgaaaggcgagucaaggucuccacaauu

SEQ ID NO: 4385 - RNA, 38 nt, Artificial Sequence
  Description of Artificial Sequence:  Enzymatic Nucleic Acid
  misc_feature (11)..(16): Phosphorothioate 3'-Internucleotide Linkage
  misc_feature (20)..(20): Phosphorothioate 3'-Internucleotide Linkage
  misc_feature (22)..(22): Phosphorothioate 3'-Internucleotide Linkage
  misc_feature (24)..(25): Phosphorothioate 3'-Internucleotide Linkage
  misc_feature (28)..(28): Phosphorothioate 3'-Internucleotide Linkage
  misc_feature (30)..(30): Phosphorothioate 3'-Internucleotide Linkage
gcggcaaagccgaaaggcgagucaaggucucccaaaag

SEQ ID NO: 4386 - RNA, 38 nt, Artificial Sequence
  Description of Artificial Sequence:  Enzymatic Nucleic Acid
  misc_feature (11)..(16): Phosphorothioate 3'-Internucleotide Linkage
  misc_feature (20)..(20): Phosphorothioate 3'-Internucleotide Linkage
  misc_feature (22)..(22): Phosphorothioate 3'-Internucleotide Linkage
  misc_feature (24)..(25): Phosphorothioate 3'-Internucleotide Linkage
  misc_feature (28)..(28): Phosphorothioate 3'-Internucleotide Linkage
  misc_feature (30)..(30): Phosphorothioate 3'-Internucleotide Linkage
cuguuuuggccgaaaggcgagucaaggucuuuguaugc

SEQ ID NO: 4387 - RNA, 38 nt, Artificial Sequence
  Description of Artificial Sequence:  Enzymatic Nucleic Acid
  misc_feature (11)..(16): Phosphorothioate 3'-Internucleotide Linkage
  misc_feature (20)..(20): Phosphorothioate 3'-Internucleotide Linkage
  misc_feature (22)..(22): Phosphorothioate 3'-Internucleotide Linkage
  misc_feature (24)..(25): Phosphorothioate 3'-Internucleotide Linkage
  misc_feature (28)..(28): Phosphorothioate 3'-Internucleotide Linkage
  misc_feature (30)..(30): Phosphorothioate 3'-Internucleotide Linkage
aguaaaaggccgaaaggcgagucaaggucucuguuuug

SEQ ID NO: 4388 - RNA, 38 nt, Artificial Sequence
  Description of Artificial Sequence:  Enzymatic Nucleic Acid
  misc_feature (11)..(16): Phosphorothioate 3'-Internucleotide Linkage
  misc_feature (20)..(20): Phosphorothioate 3'-Internucleotide Linkage
  misc_feature (22)..(22): Phosphorothioate 3'-Internucleotide Linkage
  misc_feature (24)..(25): Phosphorothioate 3'-Internucleotide Linkage
  misc_feature (28)..(28): Phosphorothioate 3'-Internucleotide Linkage
  misc_feature (30)..(30): Phosphorothioate 3'-Internucleotide Linkage
uagaaagggccgaaaggcgagucaaggucucuuguaag

SEQ ID NO: 4389 - RNA, 38 nt, Artificial Sequence
  Description of Artificial Sequence:  Enzymatic Nucleic Acid
  misc_feature (11)..(16): Phosphorothioate 3'-Internucleotide Linkage
  misc_feature (20)..(20): Phosphorothioate 3'-Internucleotide Linkage
  misc_feature (22)..(22): Phosphorothioate 3'-Internucleotide Linkage
  misc_feature (24)..(25): Phosphorothioate 3'-Internucleotide Linkage
  misc_feature (28)..(28): Phosphorothioate 3'-Internucleotide Linkage
  misc_feature (30)..(30): Phosphorothioate 3'-Internucleotide Linkage
acuguuuagccgaaaggcgagucaaggucuuuagaaag

SEQ ID NO: 4390 - RNA, 38 nt, Artificial Sequence
  Description of Artificial Sequence:  Enzymatic Nucleic Acid
  misc_feature (11)..(16): Phosphorothioate 3'-Internucleotide Linkage
  misc_feature (20)..(20): Phosphorothioate 3'-Internucleotide Linkage
  misc_feature (22)..(22): Phosphorothioate 3'-Internucleotide Linkage
  misc_feature (24)..(25): Phosphorothioate 3'-Internucleotide Linkage
  misc_feature (28)..(28): Phosphorothioate 3'-Internucleotide Linkage
  misc_feature (30)..(30): Phosphorothioate 3'-Internucleotide Linkage
uucacauagccgaaaggcgagucaaggucuuguuuacu

SEQ ID NO: 4391 - RNA, 38 nt, Artificial Sequence
  Description of Artificial Sequence:  Enzymatic Nucleic Acid
  misc_feature (11)..(16): Phosphorothioate 3'-Internucleotide Linkage
  misc_feature (20)..(20): Phosphorothioate 3'-Internucleotide Linkage
  misc_feature (22)..(22): Phosphorothioate 3'-Internucleotide Linkage
  misc_feature (24)..(25): Phosphorothioate 3'-Internucleotide Linkage
  misc_feature (28)..(28): Phosphorothioate 3'-Internucleotide Linkage
  misc_feature (30)..(30): Phosphorothioate 3'-Internucleotide Linkage
ccgagcaagccgaaaggcgagucaaggucugggguaaa

SEQ ID NO: 4392 - RNA, 38 nt, Artificial Sequence
  Description of Artificial Sequence:  Enzymatic Nucleic Acid
  misc_feature (11)..(16): Phosphorothioate 3'-Internucleotide Linkage
  misc_feature (20)..(20): Phosphorothioate 3'-Internucleotide Linkage
  misc_feature (22)..(22): Phosphorothioate 3'-Internucleotide Linkage
  misc_feature (24)..(25): Phosphorothioate 3'-Internucleotide Linkage
  misc_feature (28)..(28): Phosphorothioate 3'-Internucleotide Linkage
  misc_feature (30)..(30): Phosphorothioate 3'-Internucleotide Linkage
ggccguuggccgaaaggcgagucaaggucucgagcaac

SEQ ID NO: 4393 - RNA, 38 nt, Artificial Sequence
  Description of Artificial Sequence:  Enzymatic Nucleic Acid
  misc_feature (11)..(16): Phosphorothioate 3'-Internucleotide Linkage
  misc_feature (20)..(20): Phosphorothioate 3'-Internucleotide Linkage
  misc_feature (22)..(22): Phosphorothioate 3'-Internucleotide Linkage
  misc_feature (24)..(25): Phosphorothioate 3'-Internucleotide Linkage
  misc_feature (28)..(28): Phosphorothioate 3'-Internucleotide Linkage
  misc_feature (30)..(30): Phosphorothioate 3'-Internucleotide Linkage
agaccagggccgaaaggcgagucaaggucucguugccg

SEQ ID NO: 4394 - RNA, 38 nt, Artificial Sequence
  Description of Artificial Sequence:  Enzymatic Nucleic Acid
  misc_feature (11)..(16): Phosphorothioate 3'-Internucleotide Linkage
  misc_feature (20)..(20): Phosphorothioate 3'-Internucleotide Linkage
  misc_feature (22)..(22): Phosphorothioate 3'-Internucleotide Linkage
  misc_feature (24)..(25): Phosphorothioate 3'-Internucleotide Linkage
  misc_feature (28)..(28): Phosphorothioate 3'-Internucleotide Linkage
  misc_feature (30)..(30): Phosphorothioate 3'-Internucleotide Linkage
ggcauagagccgaaaggcgagucaaggucucaggccgu

SEQ ID NO: 4395 - RNA, 38 nt, Artificial Sequence
  Description of Artificial Sequence:  Enzymatic Nucleic Acid
  misc_feature (11)..(16): Phosphorothioate 3'-Internucleotide Linkage
  misc_feature (20)..(20): Phosphorothioate 3'-Internucleotide Linkage
  misc_feature (22)..(22): Phosphorothioate 3'-Internucleotide Linkage
  misc_feature (24)..(25): Phosphorothioate 3'-Internucleotide Linkage
  misc_feature (28)..(28): Phosphorothioate 3'-Internucleotide Linkage
  misc_feature (30)..(30): Phosphorothioate 3'-Internucleotide Linkage
agcaaacagccgaaaggcgagucaaggucuuuggcaua

SEQ ID NO: 4396 - RNA, 38 nt, Artificial Sequence
  Description of Artificial Sequence:  Enzymatic Nucleic Acid
  misc_feature (11)..(16): Phosphorothioate 3'-Internucleotide Linkage
  misc_feature (20)..(20): Phosphorothioate 3'-Internucleotide Linkage
  misc_feature (22)..(22): Phosphorothioate 3'-Internucleotide Linkage
  misc_feature (24)..(25): Phosphorothioate 3'-Internucleotide Linkage
  misc_feature (28)..(28): Phosphorothioate 3'-Internucleotide Linkage
  misc_feature (30)..(30): Phosphorothioate 3'-Internucleotide Linkage
agccccaagccgaaaggcgagucaaggucucagugggg

SEQ ID NO: 4397 - RNA, 38 nt, Artificial Sequence
  Description of Artificial Sequence:  Enzymatic Nucleic Acid
  misc_feature (11)..(16): Phosphorothioate 3'-Internucleotide Linkage
  misc_feature (20)..(20): Phosphorothioate 3'-Internucleotide Linkage
  misc_feature (22)..(22): Phosphorothioate 3'-Internucleotide Linkage
  misc_feature (24)..(25): Phosphorothioate 3'-Internucleotide Linkage
  misc_feature (28)..(28): Phosphorothioate 3'-Internucleotide Linkage
  misc_feature (30)..(30): Phosphorothioate 3'-Internucleotide Linkage
uggccaaggccgaaaggcgagucaaggucucccaacca

SEQ ID NO: 4398 - RNA, 38 nt, Artificial Sequence
  Description of Artificial Sequence:  Enzymatic Nucleic Acid
  misc_feature (11)..(16): Phosphorothioate 3'-Internucleotide Linkage
  misc_feature (20)..(20): Phosphorothioate 3'-Internucleotide Linkage
  misc_feature (22)..(22): Phosphorothioate 3'-Internucleotide Linkage
  misc_feature (24)..(25): Phosphorothioate 3'-Internucleotide Linkage
  misc_feature (28)..(28): Phosphorothioate 3'-Internucleotide Linkage
  misc_feature (30)..(30): Phosphorothioate 3'-Internucleotide Linkage
gccuaugggccgaaaggcgagucaaggucucaagcccc

SEQ ID NO: 4399 - RNA, 38 nt, Artificial Sequence
  Description of Artificial Sequence:  Enzymatic Nucleic Acid
  misc_feature (11)..(16): Phosphorothioate 3'-Internucleotide Linkage
  misc_feature (20)..(20): Phosphorothioate 3'-Internucleotide Linkage
  misc_feature (22)..(22): Phosphorothioate 3'-Internucleotide Linkage
  misc_feature (24)..(25): Phosphorothioate 3'-Internucleotide Linkage
  misc_feature (28)..(28): Phosphorothioate 3'-Internucleotide Linkage
  misc_feature (30)..(30): Phosphorothioate 3'-Internucleotide Linkage
gcugaugggccgaaaggcgagucaaggucucuauggcc

SEQ ID NO: 4400 - RNA, 38 nt, Artificial Sequence
  Description of Artificial Sequence:  Enzymatic Nucleic Acid
  misc_feature (11)..(16): Phosphorothioate 3'-Internucleotide Linkage
  misc_feature (20)..(20): Phosphorothioate 3'-Internucleotide Linkage
  misc_feature (22)..(22): Phosphorothioate 3'-Internucleotide Linkage
  misc_feature (24)..(25): Phosphorothioate 3'-Internucleotide Linkage
  misc_feature (28)..(28): Phosphorothioate 3'-Internucleotide Linkage
  misc_feature (30)..(30): Phosphorothioate 3'-Internucleotide Linkage
cgcaugcggccgaaaggcgagucaaggucuugauggcc

SEQ ID NO: 4401 - RNA, 38 nt, Artificial Sequence
  Description of Artificial Sequence:  Enzymatic Nucleic Acid
  misc_feature (11)..(16): Phosphorothioate 3'-Internucleotide Linkage
  misc_feature (20)..(20): Phosphorothioate 3'-Internucleotide Linkage
  misc_feature (22)..(22): Phosphorothioate 3'-Internucleotide Linkage
  misc_feature (24)..(25): Phosphorothioate 3'-Internucleotide Linkage
  misc_feature (28)..(28): Phosphorothioate 3'-Internucleotide Linkage
  misc_feature (30)..(30): Phosphorothioate 3'-Internucleotide Linkage
agguuccagccgaaaggcgagucaaggucugcaugcgc

SEQ ID NO: 4402 - RNA, 38 nt, Artificial Sequence
  Description of Artificial Sequence:  Enzymatic Nucleic Acid
  misc_feature (11)..(16): Phosphorothioate 3'-Internucleotide Linkage
  misc_feature (20)..(20): Phosphorothioate 3'-Internucleotide Linkage
  misc_feature (22)..(22): Phosphorothioate 3'-Internucleotide Linkage
  misc_feature (24)..(25): Phosphorothioate 3'-Internucleotide Linkage
  misc_feature (28)..(28): Phosphorothioate 3'-Internucleotide Linkage
  misc_feature (30)..(30): Phosphorothioate 3'-Internucleotide Linkage
acaagcgggccgaaaggcgagucaaggucuuaggaguu

SEQ ID NO: 4403 - RNA, 38 nt, Artificial Sequence
  Description of Artificial Sequence:  Enzymatic Nucleic Acid
  misc_feature (11)..(16): Phosphorothioate 3'-Internucleotide Linkage
  misc_feature (20)..(20): Phosphorothioate 3'-Internucleotide Linkage
  misc_feature (22)..(22): Phosphorothioate 3'-Internucleotide Linkage
  misc_feature (24)..(25): Phosphorothioate 3'-Internucleotide Linkage
  misc_feature (28)..(28): Phosphorothioate 3'-Internucleotide Linkage
  misc_feature (30)..(30): Phosphorothioate 3'-Internucleotide Linkage
cagaccuggccgaaaggcgagucaaggucuugcgagca

SEQ ID NO: 4404 - RNA, 38 nt, Artificial Sequence
  Description of Artificial Sequence:  Enzymatic Nucleic Acid
  misc_feature (11)..(16): Phosphorothioate 3'-Internucleotide Linkage
  misc_feature (20)..(20): Phosphorothioate 3'-Internucleotide Linkage
  misc_feature (22)..(22): Phosphorothioate 3'-Internucleotide Linkage
  misc_feature (24)..(25): Phosphorothioate 3'-Internucleotide Linkage
  misc_feature (28)..(28): Phosphorothioate 3'-Internucleotide Linkage
  misc_feature (30)..(30): Phosphorothioate 3'-Internucleotide Linkage
gccccagagccgaaaggcgagucaaggucucugcugcg

SEQ ID NO: 4405 - RNA, 38 nt, Artificial Sequence
  Description of Artificial Sequence:  Enzymatic Nucleic Acid
  misc_feature (11)..(16): Phosphorothioate 3'-Internucleotide Linkage
  misc_feature (20)..(20): Phosphorothioate 3'-Internucleotide Linkage
  misc_feature (22)..(22): Phosphorothioate 3'-Internucleotide Linkage
  misc_feature (24)..(25): Phosphorothioate 3'-Internucleotide Linkage
  misc_feature (28)..(28): Phosphorothioate 3'-Internucleotide Linkage
  misc_feature (30)..(30): Phosphorothioate 3'-Internucleotide Linkage
gaguuuuggccgaaaggcgagucaaggucucccagacc

SEQ ID NO: 4406 - RNA, 38 nt, Artificial Sequence
  Description of Artificial Sequence:  Enzymatic Nucleic Acid
  misc_feature (11)..(16): Phosphorothioate 3'-Internucleotide Linkage
  misc_feature (20)..(20): Phosphorothioate 3'-Internucleotide Linkage
  misc_feature (22)..(22): Phosphorothioate 3'-Internucleotide Linkage
  misc_feature (24)..(25): Phosphorothioate 3'-Internucleotide Linkage
  misc_feature (28)..(28): Phosphorothioate 3'-Internucleotide Linkage
  misc_feature (30)..(30): Phosphorothioate 3'-Internucleotide Linkage
ggagagcagccgaaaggcgagucaaggucugacagaau

SEQ ID NO: 4407 - RNA, 38 nt, Artificial Sequence
  Description of Artificial Sequence:  Enzymatic Nucleic Acid
  misc_feature (11)..(16): Phosphorothioate 3'-Internucleotide Linkage
  misc_feature (20)..(20): Phosphorothioate 3'-Internucleotide Linkage
  misc_feature (22)..(22): Phosphorothioate 3'-Internucleotide Linkage
  misc_feature (24)..(25): Phosphorothioate 3'-Internucleotide Linkage
  misc_feature (28)..(28): Phosphorothioate 3'-Internucleotide Linkage
  misc_feature (30)..(30): Phosphorothioate 3'-Internucleotide Linkage
ccuagcaggccgaaaggcgagucaaggucucauggaaa

SEQ ID NO: 4408 - RNA, 38 nt, Artificial Sequence
  Description of Artificial Sequence:  Enzymatic Nucleic Acid
  misc_feature (11)..(16): Phosphorothioate 3'-Internucleotide Linkage
  misc_feature (20)..(20): Phosphorothioate 3'-Internucleotide Linkage
  misc_feature (22)..(22): Phosphorothioate 3'-Internucleotide Linkage
  misc_feature (24)..(25): Phosphorothioate 3'-Internucleotide Linkage
  misc_feature (28)..(28): Phosphorothioate 3'-Internucleotide Linkage
  misc_feature (30)..(30): Phosphorothioate 3'-Internucleotide Linkage
cagcacaggccgaaaggcgagucaaggucucuagcagc

SEQ ID NO: 4409 - RNA, 38 nt, Artificial Sequence
  Description of Artificial Sequence:  Enzymatic Nucleic Acid
  misc_feature (11)..(16): Phosphorothioate 3'-Internucleotide Linkage
  misc_feature (20)..(20): Phosphorothioate 3'-Internucleotide Linkage
  misc_feature (22)..(22): Phosphorothioate 3'-Internucleotide Linkage
  misc_feature (24)..(25): Phosphorothioate 3'-Internucleotide Linkage
  misc_feature (28)..(28): Phosphorothioate 3'-Internucleotide Linkage
  misc_feature (30)..(30): Phosphorothioate 3'-Internucleotide Linkage
acaaaggagccgaaaggcgagucaaggucugucccgcg

SEQ ID NO: 4410 - RNA, 38 nt, Artificial Sequence
  Description of Artificial Sequence:  Enzymatic Nucleic Acid
  misc_feature (11)..(16): Phosphorothioate 3'-Internucleotide Linkage
  misc_feature (20)..(20): Phosphorothioate 3'-Internucleotide Linkage
  misc_feature (22)..(22): Phosphorothioate 3'-Internucleotide Linkage
  misc_feature (24)..(25): Phosphorothioate 3'-Internucleotide Linkage
  misc_feature (28)..(28): Phosphorothioate 3'-Internucleotide Linkage
  misc_feature (30)..(30): Phosphorothioate 3'-Internucleotide Linkage
cgacgggagccgaaaggcgagucaaggucuguaaacaa

SEQ ID NO: 4411 - RNA, 38 nt, Artificial Sequence
  Description of Artificial Sequence:  Enzymatic Nucleic Acid
  misc_feature (11)..(16): Phosphorothioate 3'-Internucleotide Linkage
  misc_feature (20)..(20): Phosphorothioate 3'-Internucleotide Linkage
  misc_feature (22)..(22): Phosphorothioate 3'-Internucleotide Linkage
  misc_feature (24)..(25): Phosphorothioate 3'-Internucleotide Linkage
  misc_feature (28)..(28): Phosphorothioate 3'-Internucleotide Linkage
  misc_feature (30)..(30): Phosphorothioate 3'-Internucleotide Linkage
agcgccgagccgaaaggcgagucaaggucugggacgua

SEQ ID NO: 4412 - RNA, 38 nt, Artificial Sequence
  Description of Artificial Sequence:  Enzymatic Nucleic Acid
  misc_feature (11)..(16): Phosphorothioate 3'-Internucleotide Linkage
  misc_feature (20)..(20): Phosphorothioate 3'-Internucleotide Linkage
  misc_feature (22)..(22): Phosphorothioate 3'-Internucleotide Linkage
  misc_feature (24)..(25): Phosphorothioate 3'-Internucleotide Linkage
  misc_feature (28)..(28): Phosphorothioate 3'-Internucleotide Linkage
  misc_feature (30)..(30): Phosphorothioate 3'-Internucleotide Linkage
auucagcggccgaaaggcgagucaaggucucgacggga

SEQ ID NO: 4413 - RNA, 38 nt, Artificial Sequence
  Description of Artificial Sequence:  Enzymatic Nucleic Acid
  misc_feature (11)..(16): Phosphorothioate 3'-Internucleotide Linkage
  misc_feature (20)..(20): Phosphorothioate 3'-Internucleotide Linkage
  misc_feature (22)..(22): Phosphorothioate 3'-Internucleotide Linkage
  misc_feature (24)..(25): Phosphorothioate 3'-Internucleotide Linkage
  misc_feature (28)..(28): Phosphorothioate 3'-Internucleotide Linkage
  misc_feature (30)..(30): Phosphorothioate 3'-Internucleotide Linkage
ccaagcgggccgaaaggcgagucaaggucucccgggag

SEQ ID NO: 4414 - RNA, 38 nt, Artificial Sequence
  Description of Artificial Sequence:  Enzymatic Nucleic Acid
  misc_feature (11)..(16): Phosphorothioate 3'-Internucleotide Linkage
  misc_feature (20)..(20): Phosphorothioate 3'-Internucleotide Linkage
  misc_feature (22)..(22): Phosphorothioate 3'-Internucleotide Linkage
  misc_feature (24)..(25): Phosphorothioate 3'-Internucleotide Linkage
  misc_feature (28)..(28): Phosphorothioate 3'-Internucleotide Linkage
  misc_feature (30)..(30): Phosphorothioate 3'-Internucleotide Linkage
cgguagaggccgaaaggcgagucaaggucucccaagcg

SEQ ID NO: 4415 - RNA, 38 nt, Artificial Sequence
  Description of Artificial Sequence:  Enzymatic Nucleic Acid
  misc_feature (11)..(16): Phosphorothioate 3'-Internucleotide Linkage
  misc_feature (20)..(20): Phosphorothioate 3'-Internucleotide Linkage
  misc_feature (22)..(22): Phosphorothioate 3'-Internucleotide Linkage
  misc_feature (24)..(25): Phosphorothioate 3'-Internucleotide Linkage
  misc_feature (28)..(28): Phosphorothioate 3'-Internucleotide Linkage
  misc_feature (30)..(30): Phosphorothioate 3'-Internucleotide Linkage
cccguggagccgaaaggcgagucaaggucuggucggua

SEQ ID NO: 4416 - RNA, 38 nt, Artificial Sequence
  Description of Artificial Sequence:  Enzymatic Nucleic Acid
  misc_feature (11)..(16): Phosphorothioate 3'-Internucleotide Linkage
  misc_feature (20)..(20): Phosphorothioate 3'-Internucleotide Linkage
  misc_feature (22)..(22): Phosphorothioate 3'-Internucleotide Linkage
  misc_feature (24)..(25): Phosphorothioate 3'-Internucleotide Linkage
  misc_feature (28)..(28): Phosphorothioate 3'-Internucleotide Linkage
  misc_feature (30)..(30): Phosphorothioate 3'-Internucleotide Linkage
gaggugcggccgaaaggcgagucaaggucucccgugga

SEQ ID NO: 4417 - RNA, 38 nt, Artificial Sequence
  Description of Artificial Sequence:  Enzymatic Nucleic Acid
  misc_feature (11)..(16): Phosphorothioate 3'-Internucleotide Linkage
  misc_feature (20)..(20): Phosphorothioate 3'-Internucleotide Linkage
  misc_feature (22)..(22): Phosphorothioate 3'-Internucleotide Linkage
  misc_feature (24)..(25): Phosphorothioate 3'-Internucleotide Linkage
  misc_feature (28)..(28): Phosphorothioate 3'-Internucleotide Linkage
  misc_feature (30)..(30): Phosphorothioate 3'-Internucleotide Linkage
ggcacagagccgaaaggcgagucaaggucuggggaguc

SEQ ID NO: 4418 - RNA, 38 nt, Artificial Sequence
  Description of Artificial Sequence:  Enzymatic Nucleic Acid
  misc_feature (11)..(16): Phosphorothioate 3'-Internucleotide Linkage
  misc_feature (20)..(20): Phosphorothioate 3'-Internucleotide Linkage
  misc_feature (22)..(22): Phosphorothioate 3'-Internucleotide Linkage
  misc_feature (24)..(25): Phosphorothioate 3'-Internucleotide Linkage
  misc_feature (28)..(28): Phosphorothioate 3'-Internucleotide Linkage
  misc_feature (30)..(30): Phosphorothioate 3'-Internucleotide Linkage
agugcacagccgaaaggcgagucaaggucugguccggc

SEQ ID NO: 4419 - RNA, 38 nt, Artificial Sequence
  Description of Artificial Sequence:  Enzymatic Nucleic Acid
  misc_feature (11)..(16): Phosphorothioate 3'-Internucleotide Linkage
  misc_feature (20)..(20): Phosphorothioate 3'-Internucleotide Linkage
  misc_feature (22)..(22): Phosphorothioate 3'-Internucleotide Linkage
  misc_feature (24)..(25): Phosphorothioate 3'-Internucleotide Linkage
  misc_feature (28)..(28): Phosphorothioate 3'-Internucleotide Linkage
  misc_feature (30)..(30): Phosphorothioate 3'-Internucleotide Linkage
ccaugcgagccgaaaggcgagucaaggucugugcagag

SEQ ID NO: 4420 - RNA, 38 nt, Artificial Sequence
  Description of Artificial Sequence:  Enzymatic Nucleic Acid
  misc_feature (11)..(16): Phosphorothioate 3'-Internucleotide Linkage
  misc_feature (20)..(20): Phosphorothioate 3'-Internucleotide Linkage
  misc_feature (22)..(22): Phosphorothioate 3'-Internucleotide Linkage
  misc_feature (24)..(25): Phosphorothioate 3'-Internucleotide Linkage
  misc_feature (28)..(28): Phosphorothioate 3'-Internucleotide Linkage
  misc_feature (30)..(30): Phosphorothioate 3'-Internucleotide Linkage
ggcguucagccgaaaggcgagucaaggucugguggucu

SEQ ID NO: 4421 - RNA, 38 nt, Artificial Sequence
  Description of Artificial Sequence:  Enzymatic Nucleic Acid
  misc_feature (11)..(16): Phosphorothioate 3'-Internucleotide Linkage
  misc_feature (20)..(20): Phosphorothioate 3'-Internucleotide Linkage
  misc_feature (22)..(22): Phosphorothioate 3'-Internucleotide Linkage
  misc_feature (24)..(25): Phosphorothioate 3'-Internucleotide Linkage
  misc_feature (28)..(28): Phosphorothioate 3'-Internucleotide Linkage
  misc_feature (30)..(30): Phosphorothioate 3'-Internucleotide Linkage
augcaagagccgaaaggcgagucaaggucucuugggca

SEQ ID NO: 4422 - RNA, 38 nt, Artificial Sequence
  Description of Artificial Sequence:  Enzymatic Nucleic Acid
  misc_feature (11)..(16): Phosphorothioate 3'-Internucleotide Linkage
  misc_feature (20)..(20): Phosphorothioate 3'-Internucleotide Linkage
  misc_feature (22)..(22): Phosphorothioate 3'-Internucleotide Linkage
  misc_feature (24)..(25): Phosphorothioate 3'-Internucleotide Linkage
  misc_feature (28)..(28): Phosphorothioate 3'-Internucleotide Linkage
  misc_feature (30)..(30): Phosphorothioate 3'-Internucleotide Linkage
ugacauuggccgaaaggcgagucaaggucuugaaaguc

SEQ ID NO: 4423 - RNA, 38 nt, Artificial Sequence
  Description of Artificial Sequence:  Enzymatic Nucleic Acid
  misc_feature (11)..(16): Phosphorothioate 3'-Internucleotide Linkage
  misc_feature (20)..(20): Phosphorothioate 3'-Internucleotide Linkage
  misc_feature (22)..(22): Phosphorothioate 3'-Internucleotide Linkage
  misc_feature (24)..(25): Phosphorothioate 3'-Internucleotide Linkage
  misc_feature (28)..(28): Phosphorothioate 3'-Internucleotide Linkage
  misc_feature (30)..(30): Phosphorothioate 3'-Internucleotide Linkage
gaaguauggccgaaaggcgagucaaggucucucaaggu

SEQ ID NO: 4424 - RNA, 38 nt, Artificial Sequence
  Description of Artificial Sequence:  Enzymatic Nucleic Acid
  misc_feature (11)..(16): Phosphorothioate 3'-Internucleotide Linkage
  misc_feature (20)..(20): Phosphorothioate 3'-Internucleotide Linkage
  misc_feature (22)..(22): Phosphorothioate 3'-Internucleotide Linkage
  misc_feature (24)..(25): Phosphorothioate 3'-Internucleotide Linkage
  misc_feature (28)..(28): Phosphorothioate 3'-Internucleotide Linkage
  misc_feature (30)..(30): Phosphorothioate 3'-Internucleotide Linkage
uccucccagccgaaaggcgagucaaggucuucauuaaa

SEQ ID NO: 4425 - RNA, 38 nt, Artificial Sequence
  Description of Artificial Sequence:  Enzymatic Nucleic Acid
  misc_feature (11)..(16): Phosphorothioate 3'-Internucleotide Linkage
  misc_feature (20)..(20): Phosphorothioate 3'-Internucleotide Linkage
  misc_feature (22)..(22): Phosphorothioate 3'-Internucleotide Linkage
  misc_feature (24)..(25): Phosphorothioate 3'-Internucleotide Linkage
  misc_feature (28)..(28): Phosphorothioate 3'-Internucleotide Linkage
  misc_feature (30)..(30): Phosphorothioate 3'-Internucleotide Linkage
ucccccaagccgaaaggcgagucaaggucuuccuccca

SEQ ID NO: 4426 - RNA, 38 nt, Artificial Sequence
  Description of Artificial Sequence:  Enzymatic Nucleic Acid
  misc_feature (11)..(16): Phosphorothioate 3'-Internucleotide Linkage
  misc_feature (20)..(20): Phosphorothioate 3'-Internucleotide Linkage
  misc_feature (22)..(22): Phosphorothioate 3'-Internucleotide Linkage
  misc_feature (24)..(25): Phosphorothioate 3'-Internucleotide Linkage
  misc_feature (28)..(28): Phosphorothioate 3'-Internucleotide Linkage
  misc_feature (30)..(30): Phosphorothioate 3'-Internucleotide Linkage
uaaccuaagccgaaaggcgagucaaggucucuccuccc

SEQ ID NO: 4427 - RNA, 38 nt, Artificial Sequence
  Description of Artificial Sequence:  Enzymatic Nucleic Acid
  misc_feature (11)..(16): Phosphorothioate 3'-Internucleotide Linkage
  misc_feature (20)..(20): Phosphorothioate 3'-Internucleotide Linkage
  misc_feature (22)..(22): Phosphorothioate 3'-Internucleotide Linkage
  misc_feature (24)..(25): Phosphorothioate 3'-Internucleotide Linkage
  misc_feature (28)..(28): Phosphorothioate 3'-Internucleotide Linkage
  misc_feature (30)..(30): Phosphorothioate 3'-Internucleotide Linkage
accuuuaagccgaaaggcgagucaaggucucuaaccuc

SEQ ID NO: 4428 - RNA, 38 nt, Artificial Sequence
  Description of Artificial Sequence:  Enzymatic Nucleic Acid
  misc_feature (11)..(16): Phosphorothioate 3'-Internucleotide Linkage
  misc_feature (20)..(20): Phosphorothioate 3'-Internucleotide Linkage
  misc_feature (22)..(22): Phosphorothioate 3'-Internucleotide Linkage
  misc_feature (24)..(25): Phosphorothioate 3'-Internucleotide Linkage
  misc_feature (28)..(28): Phosphorothioate 3'-Internucleotide Linkage
  misc_feature (30)..(30): Phosphorothioate 3'-Internucleotide Linkage
uacaaagagccgaaaggcgagucaaggucucuuuaacc

SEQ ID NO: 4429 - RNA, 38 nt, Artificial Sequence
  Description of Artificial Sequence:  Enzymatic Nucleic Acid
  misc_feature (11)..(16): Phosphorothioate 3'-Internucleotide Linkage
  misc_feature (20)..(20): Phosphorothioate 3'-Internucleotide Linkage
  misc_feature (22)..(22): Phosphorothioate 3'-Internucleotide Linkage
  misc_feature (24)..(25): Phosphorothioate 3'-Internucleotide Linkage
  misc_feature (28)..(28): Phosphorothioate 3'-Internucleotide Linkage
  misc_feature (30)..(30): Phosphorothioate 3'-Internucleotide Linkage
gccuacaggccgaaaggcgagucaaggucucuccuagu

SEQ ID NO: 4430 - RNA, 38 nt, Artificial Sequence
  Description of Artificial Sequence:  Enzymatic Nucleic Acid
  misc_feature (11)..(16): Phosphorothioate 3'-Internucleotide Linkage
  misc_feature (20)..(20): Phosphorothioate 3'-Internucleotide Linkage
  misc_feature (22)..(22): Phosphorothioate 3'-Internucleotide Linkage
  misc_feature (24)..(25): Phosphorothioate 3'-Internucleotide Linkage
  misc_feature (28)..(28): Phosphorothioate 3'-Internucleotide Linkage
  misc_feature (30)..(30): Phosphorothioate 3'-Internucleotide Linkage
aauuuauggccgaaaggcgagucaaggucucuacagcc

SEQ ID NO: 4431 - RNA, 38 nt, Artificial Sequence
  Description of Artificial Sequence:  Enzymatic Nucleic Acid
  misc_feature (11)..(16): Phosphorothioate 3'-Internucleotide Linkage
  misc_feature (20)..(20): Phosphorothioate 3'-Internucleotide Linkage
  misc_feature (22)..(22): Phosphorothioate 3'-Internucleotide Linkage
  misc_feature (24)..(25): Phosphorothioate 3'-Internucleotide Linkage
  misc_feature (28)..(28): Phosphorothioate 3'-Internucleotide Linkage
  misc_feature (30)..(30): Phosphorothioate 3'-Internucleotide Linkage
ugaacacagccgaaaggcgagucaaggucucaauuuau

SEQ ID NO: 4432 - RNA, 38 nt, Artificial Sequence
  Description of Artificial Sequence:  Enzymatic Nucleic Acid
  misc_feature (11)..(16): Phosphorothioate 3'-Internucleotide Linkage
  misc_feature (20)..(20): Phosphorothioate 3'-Internucleotide Linkage
  misc_feature (22)..(22): Phosphorothioate 3'-Internucleotide Linkage
  misc_feature (24)..(25): Phosphorothioate 3'-Internucleotide Linkage
  misc_feature (28)..(28): Phosphorothioate 3'-Internucleotide Linkage
  misc_feature (30)..(30): Phosphorothioate 3'-Internucleotide Linkage
gcaugguggccgaaaggcgagucaaggucuuggugaac

SEQ ID NO: 4433 - RNA, 38 nt, Artificial Sequence
  Description of Artificial Sequence:  Enzymatic Nucleic Acid
  misc_feature (11)..(16): Phosphorothioate 3'-Internucleotide Linkage
  misc_feature (20)..(20): Phosphorothioate 3'-Internucleotide Linkage
  misc_feature (22)..(22): Phosphorothioate 3'-Internucleotide Linkage
  misc_feature (24)..(25): Phosphorothioate 3'-Internucleotide Linkage
  misc_feature (28)..(28): Phosphorothioate 3'-Internucleotide Linkage
  misc_feature (30)..(30): Phosphorothioate 3'-Internucleotide Linkage
cuuggagggccgaaaggcgagucaaggucuuugaacag

SEQ ID NO: 4434 - RNA, 38 nt, Artificial Sequence
  Description of Artificial Sequence:  Enzymatic Nucleic Acid
  misc_feature (11)..(16): Phosphorothioate 3'-Internucleotide Linkage
  misc_feature (20)..(20): Phosphorothioate 3'-Internucleotide Linkage
  misc_feature (22)..(22): Phosphorothioate 3'-Internucleotide Linkage
  misc_feature (24)..(25): Phosphorothioate 3'-Internucleotide Linkage
  misc_feature (28)..(28): Phosphorothioate 3'-Internucleotide Linkage
  misc_feature (30)..(30): Phosphorothioate 3'-Internucleotide Linkage
aggcacaggccgaaaggcgagucaaggucuuuggaggc

SEQ ID NO: 4435 - RNA, 38 nt, Artificial Sequence
  Description of Artificial Sequence:  Enzymatic Nucleic Acid
  misc_feature (11)..(16): Phosphorothioate 3'-Internucleotide Linkage
  misc_feature (20)..(20): Phosphorothioate 3'-Internucleotide Linkage
  misc_feature (22)..(22): Phosphorothioate 3'-Internucleotide Linkage
  misc_feature (24)..(25): Phosphorothioate 3'-Internucleotide Linkage
  misc_feature (28)..(28): Phosphorothioate 3'-Internucleotide Linkage
  misc_feature (30)..(30): Phosphorothioate 3'-Internucleotide Linkage
caaagccagccgaaaggcgagucaaggucuccaaggca

SEQ ID NO: 4436 - RNA, 38 nt, Artificial Sequence
  Description of Artificial Sequence:  Enzymatic Nucleic Acid
  misc_feature (11)..(16): Phosphorothioate 3'-Internucleotide Linkage
  misc_feature (20)..(20): Phosphorothioate 3'-Internucleotide Linkage
  misc_feature (22)..(22): Phosphorothioate 3'-Internucleotide Linkage
  misc_feature (24)..(25): Phosphorothioate 3'-Internucleotide Linkage
  misc_feature (28)..(28): Phosphorothioate 3'-Internucleotide Linkage
  misc_feature (30)..(30): Phosphorothioate 3'-Internucleotide Linkage
ccccaaaggccgaaaggcgagucaaggucucacccaag

SEQ ID NO: 4437 - RNA, 38 nt, Artificial Sequence
  Description of Artificial Sequence:  Enzymatic Nucleic Acid
  misc_feature (11)..(16): Phosphorothioate 3'-Internucleotide Linkage
  misc_feature (20)..(20): Phosphorothioate 3'-Internucleotide Linkage
  misc_feature (22)..(22): Phosphorothioate 3'-Internucleotide Linkage
  misc_feature (24)..(25): Phosphorothioate 3'-Internucleotide Linkage
  misc_feature (28)..(28): Phosphorothioate 3'-Internucleotide Linkage
  misc_feature (30)..(30): Phosphorothioate 3'-Internucleotide Linkage
uguccauggccgaaaggcgagucaaggucucccaaagc

SEQ ID NO: 4438 - RNA, 38 nt, Artificial Sequence
  Description of Artificial Sequence:  Enzymatic Nucleic Acid
  misc_feature (11)..(16): Phosphorothioate 3'-Internucleotide Linkage
  misc_feature (20)..(20): Phosphorothioate 3'-Internucleotide Linkage
  misc_feature (22)..(22): Phosphorothioate 3'-Internucleotide Linkage
  misc_feature (24)..(25): Phosphorothioate 3'-Internucleotide Linkage
  misc_feature (28)..(28): Phosphorothioate 3'-Internucleotide Linkage
  misc_feature (30)..(30): Phosphorothioate 3'-Internucleotide Linkage
ucuuuauagccgaaaggcgagucaaggucugggucaau

SEQ ID NO: 4439 - RNA, 38 nt, Artificial Sequence
  Description of Artificial Sequence:  Enzymatic Nucleic Acid
  misc_feature (11)..(16): Phosphorothioate 3'-Internucleotide Linkage
  misc_feature (20)..(20): Phosphorothioate 3'-Internucleotide Linkage
  misc_feature (22)..(22): Phosphorothioate 3'-Internucleotide Linkage
  misc_feature (24)..(25): Phosphorothioate 3'-Internucleotide Linkage
  misc_feature (28)..(28): Phosphorothioate 3'-Internucleotide Linkage
  misc_feature (30)..(30): Phosphorothioate 3'-Internucleotide Linkage
cacagaaggccgaaaggcgagucaaggucuuccaaauu

SEQ ID NO: 4440 - RNA, 38 nt, Artificial Sequence
  Description of Artificial Sequence:  Enzymatic Nucleic Acid
  misc_feature (11)..(16): Phosphorothioate 3'-Internucleotide Linkage
  misc_feature (20)..(20): Phosphorothioate 3'-Internucleotide Linkage
  misc_feature (22)..(22): Phosphorothioate 3'-Internucleotide Linkage
  misc_feature (24)..(25): Phosphorothioate 3'-Internucleotide Linkage
  misc_feature (28)..(28): Phosphorothioate 3'-Internucleotide Linkage
  misc_feature (30)..(30): Phosphorothioate 3'-Internucleotide Linkage
gagaguaagccgaaaggcgagucaaggucuuccacaga

SEQ ID NO: 4441 - RNA, 38 nt, Artificial Sequence
  Description of Artificial Sequence:  Enzymatic Nucleic Acid
  misc_feature (11)..(16): Phosphorothioate 3'-Internucleotide Linkage
  misc_feature (20)..(20): Phosphorothioate 3'-Internucleotide Linkage
  misc_feature (22)..(22): Phosphorothioate 3'-Internucleotide Linkage
  misc_feature (24)..(25): Phosphorothioate 3'-Internucleotide Linkage
  misc_feature (28)..(28): Phosphorothioate 3'-Internucleotide Linkage
  misc_feature (30)..(30): Phosphorothioate 3'-Internucleotide Linkage
cucuaagggccgaaaggcgagucaaggucucccccgau

SEQ ID NO: 4442 - RNA, 38 nt, Artificial Sequence
  Description of Artificial Sequence:  Enzymatic Nucleic Acid
  misc_feature (11)..(16): Phosphorothioate 3'-Internucleotide Linkage
  misc_feature (20)..(20): Phosphorothioate 3'-Internucleotide Linkage
  misc_feature (22)..(22): Phosphorothioate 3'-Internucleotide Linkage
  misc_feature (24)..(25): Phosphorothioate 3'-Internucleotide Linkage
  misc_feature (28)..(28): Phosphorothioate 3'-Internucleotide Linkage
  misc_feature (30)..(30): Phosphorothioate 3'-Internucleotide Linkage
uccggagagccgaaaggcgagucaaggucuucuaaggc

SEQ ID NO: 4443 - RNA, 38 nt, Artificial Sequence
  Description of Artificial Sequence:  Enzymatic Nucleic Acid
  misc_feature (11)..(16): Phosphorothioate 3'-Internucleotide Linkage
  misc_feature (20)..(20): Phosphorothioate 3'-Internucleotide Linkage
  misc_feature (22)..(22): Phosphorothioate 3'-Internucleotide Linkage
  misc_feature (24)..(25): Phosphorothioate 3'-Internucleotide Linkage
  misc_feature (28)..(28): Phosphorothioate 3'-Internucleotide Linkage
  misc_feature (30)..(30): Phosphorothioate 3'-Internucleotide Linkage
ccugaguggccgaaaggcgagucaaggucucguauggu

SEQ ID NO: 4444 - RNA, 38 nt, Artificial Sequence
  Description of Artificial Sequence:  Enzymatic Nucleic Acid
  misc_feature (11)..(16): Phosphorothioate 3'-Internucleotide Linkage
  misc_feature (20)..(20): Phosphorothioate 3'-Internucleotide Linkage
  misc_feature (22)..(22): Phosphorothioate 3'-Internucleotide Linkage
  misc_feature (24)..(25): Phosphorothioate 3'-Internucleotide Linkage
  misc_feature (28)..(28): Phosphorothioate 3'-Internucleotide Linkage
  misc_feature (30)..(30): Phosphorothioate 3'-Internucleotide Linkage
auagcuuggccgaaaggcgagucaaggucucugagugc

SEQ ID NO: 4445 - RNA, 38 nt, Artificial Sequence
  Description of Artificial Sequence:  Enzymatic Nucleic Acid
  misc_feature (11)..(16): Phosphorothioate 3'-Internucleotide Linkage
  misc_feature (20)..(20): Phosphorothioate 3'-Internucleotide Linkage
  misc_feature (22)..(22): Phosphorothioate 3'-Internucleotide Linkage
  misc_feature (24)..(25): Phosphorothioate 3'-Internucleotide Linkage
  misc_feature (28)..(28): Phosphorothioate 3'-Internucleotide Linkage
  misc_feature (30)..(30): Phosphorothioate 3'-Internucleotide Linkage
cagaauaggccgaaaggcgagucaaggucuuugccuga

SEQ ID NO: 4446 - RNA, 38 nt, Artificial Sequence
  Description of Artificial Sequence:  Enzymatic Nucleic Acid
  misc_feature (11)..(16): Phosphorothioate 3'-Internucleotide Linkage
  misc_feature (20)..(20): Phosphorothioate 3'-Internucleotide Linkage
  misc_feature (22)..(22): Phosphorothioate 3'-Internucleotide Linkage
  misc_feature (24)..(25): Phosphorothioate 3'-Internucleotide Linkage
  misc_feature (28)..(28): Phosphorothioate 3'-Internucleotide Linkage
  misc_feature (30)..(30): Phosphorothioate 3'-Internucleotide Linkage
ucaacucagccgaaaggcgagucaaggucucccaacac

SEQ ID NO: 4447 - RNA, 38 nt, Artificial Sequence
  Description of Artificial Sequence:  Enzymatic Nucleic Acid
  misc_feature (11)..(16): Phosphorothioate 3'-Internucleotide Linkage
  misc_feature (20)..(20): Phosphorothioate 3'-Internucleotide Linkage
  misc_feature (22)..(22): Phosphorothioate 3'-Internucleotide Linkage
  misc_feature (24)..(25): Phosphorothioate 3'-Internucleotide Linkage
  misc_feature (28)..(28): Phosphorothioate 3'-Internucleotide Linkage
  misc_feature (30)..(30): Phosphorothioate 3'-Internucleotide Linkage
uucaucaagccgaaaggcgagucaaggucuucacccca

SEQ ID NO: 4448 - RNA, 38 nt, Artificial Sequence
  Description of Artificial Sequence:  Enzymatic Nucleic Acid
  misc_feature (11)..(16): Phosphorothioate 3'-Internucleotide Linkage
  misc_feature (20)..(20): Phosphorothioate 3'-Internucleotide Linkage
  misc_feature (22)..(22): Phosphorothioate 3'-Internucleotide Linkage
  misc_feature (24)..(25): Phosphorothioate 3'-Internucleotide Linkage
  misc_feature (28)..(28): Phosphorothioate 3'-Internucleotide Linkage
  misc_feature (30)..(30): Phosphorothioate 3'-Internucleotide Linkage
ccaggugggccgaaaggcgagucaaggucuuagauuca

SEQ ID NO: 4449 - RNA, 38 nt, Artificial Sequence
  Description of Artificial Sequence:  Enzymatic Nucleic Acid
  misc_feature (11)..(16): Phosphorothioate 3'-Internucleotide Linkage
  misc_feature (20)..(20): Phosphorothioate 3'-Internucleotide Linkage
  misc_feature (22)..(22): Phosphorothioate 3'-Internucleotide Linkage
  misc_feature (24)..(25): Phosphorothioate 3'-Internucleotide Linkage
  misc_feature (28)..(28): Phosphorothioate 3'-Internucleotide Linkage
  misc_feature (30)..(30): Phosphorothioate 3'-Internucleotide Linkage
acuucccagccgaaaggcgagucaaggucuccaggugg

SEQ ID NO: 4450 - RNA, 38 nt, Artificial Sequence
  Description of Artificial Sequence:  Enzymatic Nucleic Acid
  misc_feature (11)..(16): Phosphorothioate 3'-Internucleotide Linkage
  misc_feature (20)..(20): Phosphorothioate 3'-Internucleotide Linkage
  misc_feature (22)..(22): Phosphorothioate 3'-Internucleotide Linkage
  misc_feature (24)..(25): Phosphorothioate 3'-Internucleotide Linkage
  misc_feature (28)..(28): Phosphorothioate 3'-Internucleotide Linkage
  misc_feature (30)..(30): Phosphorothioate 3'-Internucleotide Linkage
ccaaauuagccgaaaggcgagucaaggucuuucccacc

SEQ ID NO: 4451 - RNA, 38 nt, Artificial Sequence
  Description of Artificial Sequence:  Enzymatic Nucleic Acid
  misc_feature (11)..(16): Phosphorothioate 3'-Internucleotide Linkage
  misc_feature (20)..(20): Phosphorothioate 3'-Internucleotide Linkage
  misc_feature (22)..(22): Phosphorothioate 3'-Internucleotide Linkage
  misc_feature (24)..(25): Phosphorothioate 3'-Internucleotide Linkage
  misc_feature (28)..(28): Phosphorothioate 3'-Internucleotide Linkage
  misc_feature (30)..(30): Phosphorothioate 3'-Internucleotide Linkage
ccuggauggccgaaaggcgagucaaggucuuggaucuu

SEQ ID NO: 4452 - RNA, 38 nt, Artificial Sequence
  Description of Artificial Sequence:  Enzymatic Nucleic Acid
  misc_feature (11)..(16): Phosphorothioate 3'-Internucleotide Linkage
  misc_feature (20)..(20): Phosphorothioate 3'-Internucleotide Linkage
  misc_feature (22)..(22): Phosphorothioate 3'-Internucleotide Linkage
  misc_feature (24)..(25): Phosphorothioate 3'-Internucleotide Linkage
  misc_feature (28)..(28): Phosphorothioate 3'-Internucleotide Linkage
  misc_feature (30)..(30): Phosphorothioate 3'-Internucleotide Linkage
gcugacuagccgaaaggcgagucaaggucuuaauuccc

SEQ ID NO: 4453 - RNA, 38 nt, Artificial Sequence
  Description of Artificial Sequence:  Enzymatic Nucleic Acid
  misc_feature (11)..(16): Phosphorothioate 3'-Internucleotide Linkage
  misc_feature (20)..(20): Phosphorothioate 3'-Internucleotide Linkage
  misc_feature (22)..(22): Phosphorothioate 3'-Internucleotide Linkage
  misc_feature (24)..(25): Phosphorothioate 3'-Internucleotide Linkage
  misc_feature (28)..(28): Phosphorothioate 3'-Internucleotide Linkage
  misc_feature (30)..(30): Phosphorothioate 3'-Internucleotide Linkage
auagcugagccgaaaggcgagucaaggucuuacuaauu

SEQ ID NO: 4454 - RNA, 38 nt, Artificial Sequence
  Description of Artificial Sequence:  Enzymatic Nucleic Acid
  misc_feature (11)..(16): Phosphorothioate 3'-Internucleotide Linkage
  misc_feature (20)..(20): Phosphorothioate 3'-Internucleotide Linkage
  misc_feature (22)..(22): Phosphorothioate 3'-Internucleotide Linkage
  misc_feature (24)..(25): Phosphorothioate 3'-Internucleotide Linkage
  misc_feature (28)..(28): Phosphorothioate 3'-Internucleotide Linkage
  misc_feature (30)..(30): Phosphorothioate 3'-Internucleotide Linkage
ugacauaggccgaaaggcgagucaaggucuugacuacu

SEQ ID NO: 4455 - RNA, 38 nt, Artificial Sequence
  Description of Artificial Sequence:  Enzymatic Nucleic Acid
  misc_feature (11)..(16): Phosphorothioate 3'-Internucleotide Linkage
  misc_feature (20)..(20): Phosphorothioate 3'-Internucleotide Linkage
  misc_feature (22)..(22): Phosphorothioate 3'-Internucleotide Linkage
  misc_feature (24)..(25): Phosphorothioate 3'-Internucleotide Linkage
  misc_feature (28)..(28): Phosphorothioate 3'-Internucleotide Linkage
  misc_feature (30)..(30): Phosphorothioate 3'-Internucleotide Linkage
cauauuaagccgaaaggcgagucaaggucuguugacau

SEQ ID NO: 4456 - RNA, 38 nt, Artificial Sequence
  Description of Artificial Sequence:  Enzymatic Nucleic Acid
  misc_feature (11)..(16): Phosphorothioate 3'-Internucleotide Linkage
  misc_feature (20)..(20): Phosphorothioate 3'-Internucleotide Linkage
  misc_feature (22)..(22): Phosphorothioate 3'-Internucleotide Linkage
  misc_feature (24)..(25): Phosphorothioate 3'-Internucleotide Linkage
  misc_feature (28)..(28): Phosphorothioate 3'-Internucleotide Linkage
  misc_feature (30)..(30): Phosphorothioate 3'-Internucleotide Linkage
uuuuuagggccgaaaggcgagucaaggucuccauauua

SEQ ID NO: 4457 - RNA, 38 nt, Artificial Sequence
  Description of Artificial Sequence:  Enzymatic Nucleic Acid
  misc_feature (11)..(16): Phosphorothioate 3'-Internucleotide Linkage
  misc_feature (20)..(20): Phosphorothioate 3'-Internucleotide Linkage
  misc_feature (22)..(22): Phosphorothioate 3'-Internucleotide Linkage
  misc_feature (24)..(25): Phosphorothioate 3'-Internucleotide Linkage
  misc_feature (28)..(28): Phosphorothioate 3'-Internucleotide Linkage
  misc_feature (30)..(30): Phosphorothioate 3'-Internucleotide Linkage
augugaaagccgaaaggcgagucaaggucucacaauag

SEQ ID NO: 4458 - RNA, 38 nt, Artificial Sequence
  Description of Artificial Sequence:  Enzymatic Nucleic Acid
  misc_feature (11)..(16): Phosphorothioate 3'-Internucleotide Linkage
  misc_feature (20)..(20): Phosphorothioate 3'-Internucleotide Linkage
  misc_feature (22)..(22): Phosphorothioate 3'-Internucleotide Linkage
  misc_feature (24)..(25): Phosphorothioate 3'-Internucleotide Linkage
  misc_feature (28)..(28): Phosphorothioate 3'-Internucleotide Linkage
  misc_feature (30)..(30): Phosphorothioate 3'-Internucleotide Linkage
guuucucggccgaaaggcgagucaaggucuccaaaagu

SEQ ID NO: 4459 - RNA, 38 nt, Artificial Sequence
  Description of Artificial Sequence:  Enzymatic Nucleic Acid
  misc_feature (11)..(16): Phosphorothioate 3'-Internucleotide Linkage
  misc_feature (20)..(20): Phosphorothioate 3'-Internucleotide Linkage
  misc_feature (22)..(22): Phosphorothioate 3'-Internucleotide Linkage
  misc_feature (24)..(25): Phosphorothioate 3'-Internucleotide Linkage
  misc_feature (28)..(28): Phosphorothioate 3'-Internucleotide Linkage
  misc_feature (30)..(30): Phosphorothioate 3'-Internucleotide Linkage
aaaagacagccgaaaggcgagucaaggucucaaauauu

SEQ ID NO: 4460 - RNA, 38 nt, Artificial Sequence
  Description of Artificial Sequence:  Enzymatic Nucleic Acid
  misc_feature (11)..(16): Phosphorothioate 3'-Internucleotide Linkage
  misc_feature (20)..(20): Phosphorothioate 3'-Internucleotide Linkage
  misc_feature (22)..(22): Phosphorothioate 3'-Internucleotide Linkage
  misc_feature (24)..(25): Phosphorothioate 3'-Internucleotide Linkage
  misc_feature (28)..(28): Phosphorothioate 3'-Internucleotide Linkage
  misc_feature (30)..(30): Phosphorothioate 3'-Internucleotide Linkage
aauccacagccgaaaggcgagucaaggucuuccaaaag

SEQ ID NO: 4461 - RNA, 38 nt, Artificial Sequence
  Description of Artificial Sequence:  Enzymatic Nucleic Acid
  misc_feature (11)..(16): Phosphorothioate 3'-Internucleotide Linkage
  misc_feature (20)..(20): Phosphorothioate 3'-Internucleotide Linkage
  misc_feature (22)..(22): Phosphorothioate 3'-Internucleotide Linkage
  misc_feature (24)..(25): Phosphorothioate 3'-Internucleotide Linkage
  misc_feature (28)..(28): Phosphorothioate 3'-Internucleotide Linkage
  misc_feature (30)..(30): Phosphorothioate 3'-Internucleotide Linkage
gggaccuggccgaaaggcgagucaaggucucucuucgu

SEQ ID NO: 4462 - RNA, 38 nt, Artificial Sequence
  Description of Artificial Sequence:  Enzymatic Nucleic Acid
  misc_feature (11)..(16): Phosphorothioate 3'-Internucleotide Linkage
  misc_feature (20)..(20): Phosphorothioate 3'-Internucleotide Linkage
  misc_feature (22)..(22): Phosphorothioate 3'-Internucleotide Linkage
  misc_feature (24)..(25): Phosphorothioate 3'-Internucleotide Linkage
  misc_feature (28)..(28): Phosphorothioate 3'-Internucleotide Linkage
  misc_feature (30)..(30): Phosphorothioate 3'-Internucleotide Linkage
cuaggggagccgaaaggcgagucaaggucucugccucu

SEQ ID NO: 4463 - RNA, 38 nt, Artificial Sequence
  Description of Artificial Sequence:  Enzymatic Nucleic Acid
  misc_feature (11)..(16): Phosphorothioate 3'-Internucleotide Linkage
  misc_feature (20)..(20): Phosphorothioate 3'-Internucleotide Linkage
  misc_feature (22)..(22): Phosphorothioate 3'-Internucleotide Linkage
  misc_feature (24)..(25): Phosphorothioate 3'-Internucleotide Linkage
  misc_feature (28)..(28): Phosphorothioate 3'-Internucleotide Linkage
  misc_feature (30)..(30): Phosphorothioate 3'-Internucleotide Linkage
gauugagagccgaaaggcgagucaaggucucuucgucu

SEQ ID NO: 4464 - RNA, 38 nt, Artificial Sequence
  Description of Artificial Sequence:  Enzymatic Nucleic Acid
  misc_feature (11)..(16): Phosphorothioate 3'-Internucleotide Linkage
  misc_feature (20)..(20): Phosphorothioate 3'-Internucleotide Linkage
  misc_feature (22)..(22): Phosphorothioate 3'-Internucleotide Linkage
  misc_feature (24)..(25): Phosphorothioate 3'-Internucleotide Linkage
  misc_feature (28)..(28): Phosphorothioate 3'-Internucleotide Linkage
  misc_feature (30)..(30): Phosphorothioate 3'-Internucleotide Linkage
uucugcgagccgaaaggcgagucaaggucugcggcgau

SEQ ID NO: 4465 - RNA, 38 nt, Artificial Sequence
  Description of Artificial Sequence:  Enzymatic Nucleic Acid
  misc_feature (11)..(16): Phosphorothioate 3'-Internucleotide Linkage
  misc_feature (20)..(20): Phosphorothioate 3'-Internucleotide Linkage
  misc_feature (22)..(22): Phosphorothioate 3'-Internucleotide Linkage
  misc_feature (24)..(25): Phosphorothioate 3'-Internucleotide Linkage
  misc_feature (28)..(28): Phosphorothioate 3'-Internucleotide Linkage
  misc_feature (30)..(30): Phosphorothioate 3'-Internucleotide Linkage
aaggaauagccgaaaggcgagucaaggucuuaacauug

SEQ ID NO: 4466 - RNA, 38 nt, Artificial Sequence
  Description of Artificial Sequence:  Enzymatic Nucleic Acid
  misc_feature (11)..(16): Phosphorothioate 3'-Internucleotide Linkage
  misc_feature (20)..(20): Phosphorothioate 3'-Internucleotide Linkage
  misc_feature (22)..(22): Phosphorothioate 3'-Internucleotide Linkage
  misc_feature (24)..(25): Phosphorothioate 3'-Internucleotide Linkage
  misc_feature (28)..(28): Phosphorothioate 3'-Internucleotide Linkage
  misc_feature (30)..(30): Phosphorothioate 3'-Internucleotide Linkage
guuucccagccgaaaggcgagucaaggucucuuaugug

SEQ ID NO: 4467 - RNA, 38 nt, Artificial Sequence
  Description of Artificial Sequence:  Enzymatic Nucleic Acid
  misc_feature (11)..(16): Phosphorothioate 3'-Internucleotide Linkage
  misc_feature (20)..(20): Phosphorothioate 3'-Internucleotide Linkage
  misc_feature (22)..(22): Phosphorothioate 3'-Internucleotide Linkage
  misc_feature (24)..(25): Phosphorothioate 3'-Internucleotide Linkage
  misc_feature (28)..(28): Phosphorothioate 3'-Internucleotide Linkage
  misc_feature (30)..(30): Phosphorothioate 3'-Internucleotide Linkage
gaauaaaggccgaaaggcgagucaaggucucccguaaa

SEQ ID NO: 4468 - RNA, 38 nt, Artificial Sequence
  Description of Artificial Sequence:  Enzymatic Nucleic Acid
  misc_feature (11)..(16): Phosphorothioate 3'-Internucleotide Linkage
  misc_feature (20)..(20): Phosphorothioate 3'-Internucleotide Linkage
  misc_feature (22)..(22): Phosphorothioate 3'-Internucleotide Linkage
  misc_feature (24)..(25): Phosphorothioate 3'-Internucleotide Linkage
  misc_feature (28)..(28): Phosphorothioate 3'-Internucleotide Linkage
  misc_feature (30)..(30): Phosphorothioate 3'-Internucleotide Linkage
gcaagguagccgaaaggcgagucaaggucucguagaag

SEQ ID NO: 4469 - RNA, 38 nt, Artificial Sequence
  Description of Artificial Sequence:  Enzymatic Nucleic Acid
  misc_feature (11)..(16): Phosphorothioate 3'-Internucleotide Linkage
  misc_feature (20)..(20): Phosphorothioate 3'-Internucleotide Linkage
  misc_feature (22)..(22): Phosphorothioate 3'-Internucleotide Linkage
  misc_feature (24)..(25): Phosphorothioate 3'-Internucleotide Linkage
  misc_feature (28)..(28): Phosphorothioate 3'-Internucleotide Linkage
  misc_feature (30)..(30): Phosphorothioate 3'-Internucleotide Linkage
ggaguuuggccgaaaggcgagucaaggucucauuuagg

SEQ ID NO: 4470 - RNA, 38 nt, Artificial Sequence
  Description of Artificial Sequence:  Enzymatic Nucleic Acid
  misc_feature (11)..(16): Phosphorothioate 3'-Internucleotide Linkage
  misc_feature (20)..(20): Phosphorothioate 3'-Internucleotide Linkage
  misc_feature (22)..(22): Phosphorothioate 3'-Internucleotide Linkage
  misc_feature (24)..(25): Phosphorothioate 3'-Internucleotide Linkage
  misc_feature (28)..(28): Phosphorothioate 3'-Internucleotide Linkage
  misc_feature (30)..(30): Phosphorothioate 3'-Internucleotide Linkage
acaaauuggccgaaaggcgagucaaggucuuuacaucu

SEQ ID NO: 4471 - RNA, 38 nt, Artificial Sequence
  Description of Artificial Sequence:  Enzymatic Nucleic Acid
  misc_feature (11)..(16): Phosphorothioate 3'-Internucleotide Linkage
  misc_feature (20)..(20): Phosphorothioate 3'-Internucleotide Linkage
  misc_feature (22)..(22): Phosphorothioate 3'-Internucleotide Linkage
  misc_feature (24)..(25): Phosphorothioate 3'-Internucleotide Linkage
  misc_feature (28)..(28): Phosphorothioate 3'-Internucleotide Linkage
  misc_feature (30)..(30): Phosphorothioate 3'-Internucleotide Linkage
guaagggggccgaaaggcgagucaaggucucccacaaa

SEQ ID NO: 4472 - RNA, 38 nt, Artificial Sequence
  Description of Artificial Sequence:  Enzymatic Nucleic Acid
  misc_feature (11)..(16): Phosphorothioate 3'-Internucleotide Linkage
  misc_feature (20)..(20): Phosphorothioate 3'-Internucleotide Linkage
  misc_feature (22)..(22): Phosphorothioate 3'-Internucleotide Linkage
  misc_feature (24)..(25): Phosphorothioate 3'-Internucleotide Linkage
  misc_feature (28)..(28): Phosphorothioate 3'-Internucleotide Linkage
  misc_feature (30)..(30): Phosphorothioate 3'-Internucleotide Linkage
uucauuuagccgaaaggcgagucaaggucuuguaaggg

SEQ ID NO: 4473 - RNA, 38 nt, Artificial Sequence
  Description of Artificial Sequence:  Enzymatic Nucleic Acid
  misc_feature (11)..(16): Phosphorothioate 3'-Internucleotide Linkage
  misc_feature (20)..(20): Phosphorothioate 3'-Internucleotide Linkage
  misc_feature (22)..(22): Phosphorothioate 3'-Internucleotide Linkage
  misc_feature (24)..(25): Phosphorothioate 3'-Internucleotide Linkage
  misc_feature (28)..(28): Phosphorothioate 3'-Internucleotide Linkage
  misc_feature (30)..(30): Phosphorothioate 3'-Internucleotide Linkage
ggauaaaagccgaaaggcgagucaaggucucuagcagg

SEQ ID NO: 4474 - RNA, 38 nt, Artificial Sequence
  Description of Artificial Sequence:  Enzymatic Nucleic Acid
  misc_feature (11)..(16): Phosphorothioate 3'-Internucleotide Linkage
  misc_feature (20)..(20): Phosphorothioate 3'-Internucleotide Linkage
  misc_feature (22)..(22): Phosphorothioate 3'-Internucleotide Linkage
  misc_feature (24)..(25): Phosphorothioate 3'-Internucleotide Linkage
  misc_feature (28)..(28): Phosphorothioate 3'-Internucleotide Linkage
  misc_feature (30)..(30): Phosphorothioate 3'-Internucleotide Linkage
ggauaauagccgaaaggcgagucaaggucugguuugau

SEQ ID NO: 4475 - RNA, 38 nt, Artificial Sequence
  Description of Artificial Sequence:  Enzymatic Nucleic Acid
  misc_feature (11)..(16): Phosphorothioate 3'-Internucleotide Linkage
  misc_feature (20)..(20): Phosphorothioate 3'-Internucleotide Linkage
  misc_feature (22)..(22): Phosphorothioate 3'-Internucleotide Linkage
  misc_feature (24)..(25): Phosphorothioate 3'-Internucleotide Linkage
  misc_feature (28)..(28): Phosphorothioate 3'-Internucleotide Linkage
  misc_feature (30)..(30): Phosphorothioate 3'-Internucleotide Linkage
acuacauagccgaaaggcgagucaaggucuucuggaua

SEQ ID NO: 4476 - RNA, 38 nt, Artificial Sequence
  Description of Artificial Sequence:  Enzymatic Nucleic Acid
  misc_feature (11)..(16): Phosphorothioate 3'-Internucleotide Linkage
  misc_feature (20)..(20): Phosphorothioate 3'-Internucleotide Linkage
  misc_feature (22)..(22): Phosphorothioate 3'-Internucleotide Linkage
  misc_feature (24)..(25): Phosphorothioate 3'-Internucleotide Linkage
  misc_feature (28)..(28): Phosphorothioate 3'-Internucleotide Linkage
  misc_feature (30)..(30): Phosphorothioate 3'-Internucleotide Linkage
augauuaagccgaaaggcgagucaaggucuuacauacu

SEQ ID NO: 4477 - RNA, 38 nt, Artificial Sequence
  Description of Artificial Sequence:  Enzymatic Nucleic Acid
  misc_feature (11)..(16): Phosphorothioate 3'-Internucleotide Linkage
  misc_feature (20)..(20): Phosphorothioate 3'-Internucleotide Linkage
  misc_feature (22)..(22): Phosphorothioate 3'-Internucleotide Linkage
  misc_feature (24)..(25): Phosphorothioate 3'-Internucleotide Linkage
  misc_feature (28)..(28): Phosphorothioate 3'-Internucleotide Linkage
  misc_feature (30)..(30): Phosphorothioate 3'-Internucleotide Linkage
gauccccggccgaaaggcgagucaaggucucuuccaaa

SEQ ID NO: 4478 - RNA, 38 nt, Artificial Sequence
  Description of Artificial Sequence:  Enzymatic Nucleic Acid
  misc_feature (11)..(16): Phosphorothioate 3'-Internucleotide Linkage
  misc_feature (20)..(20): Phosphorothioate 3'-Internucleotide Linkage
  misc_feature (22)..(22): Phosphorothioate 3'-Internucleotide Linkage
  misc_feature (24)..(25): Phosphorothioate 3'-Internucleotide Linkage
  misc_feature (28)..(28): Phosphorothioate 3'-Internucleotide Linkage
  misc_feature (30)..(30): Phosphorothioate 3'-Internucleotide Linkage
cguguggagccgaaaggcgagucaaggucuucucuuuu

SEQ ID NO: 4479 - RNA, 38 nt, Artificial Sequence
  Description of Artificial Sequence:  Enzymatic Nucleic Acid
  misc_feature (11)..(16): Phosphorothioate 3'-Internucleotide Linkage
  misc_feature (20)..(20): Phosphorothioate 3'-Internucleotide Linkage
  misc_feature (22)..(22): Phosphorothioate 3'-Internucleotide Linkage
  misc_feature (24)..(25): Phosphorothioate 3'-Internucleotide Linkage
  misc_feature (28)..(28): Phosphorothioate 3'-Internucleotide Linkage
  misc_feature (30)..(30): Phosphorothioate 3'-Internucleotide Linkage
aggcgcuagccgaaaggcgagucaaggucuguguggac

SEQ ID NO: 4480 - RNA, 38 nt, Artificial Sequence
  Description of Artificial Sequence:  Enzymatic Nucleic Acid
  misc_feature (11)..(16): Phosphorothioate 3'-Internucleotide Linkage
  misc_feature (20)..(20): Phosphorothioate 3'-Internucleotide Linkage
  misc_feature (22)..(22): Phosphorothioate 3'-Internucleotide Linkage
  misc_feature (24)..(25): Phosphorothioate 3'-Internucleotide Linkage
  misc_feature (28)..(28): Phosphorothioate 3'-Internucleotide Linkage
  misc_feature (30)..(30): Phosphorothioate 3'-Internucleotide Linkage
augaggcggccgaaaggcgagucaaggucuuacgugug

SEQ ID NO: 4481 - RNA, 38 nt, Artificial Sequence
  Description of Artificial Sequence:  Enzymatic Nucleic Acid
  misc_feature (11)..(16): Phosphorothioate 3'-Internucleotide Linkage
  misc_feature (20)..(20): Phosphorothioate 3'-Internucleotide Linkage
  misc_feature (22)..(22): Phosphorothioate 3'-Internucleotide Linkage
  misc_feature (24)..(25): Phosphorothioate 3'-Internucleotide Linkage
  misc_feature (28)..(28): Phosphorothioate 3'-Internucleotide Linkage
  misc_feature (30)..(30): Phosphorothioate 3'-Internucleotide Linkage
uauggugagccgaaaggcgagucaaggucuccgcaaaa

SEQ ID NO: 4482 - RNA, 38 nt, Artificial Sequence
  Description of Artificial Sequence:  Enzymatic Nucleic Acid
  misc_feature (11)..(16): Phosphorothioate 3'-Internucleotide Linkage
  misc_feature (20)..(20): Phosphorothioate 3'-Internucleotide Linkage
  misc_feature (22)..(22): Phosphorothioate 3'-Internucleotide Linkage
  misc_feature (24)..(25): Phosphorothioate 3'-Internucleotide Linkage
  misc_feature (28)..(28): Phosphorothioate 3'-Internucleotide Linkage
  misc_feature (30)..(30): Phosphorothioate 3'-Internucleotide Linkage
cucccauggccgaaaggcgagucaaggucuuguagauc

SEQ ID NO: 4483 - RNA, 38 nt, Artificial Sequence
  Description of Artificial Sequence:  Enzymatic Nucleic Acid
  misc_feature (11)..(16): Phosphorothioate 3'-Internucleotide Linkage
  misc_feature (20)..(20): Phosphorothioate 3'-Internucleotide Linkage
  misc_feature (22)..(22): Phosphorothioate 3'-Internucleotide Linkage
  misc_feature (24)..(25): Phosphorothioate 3'-Internucleotide Linkage
  misc_feature (28)..(28): Phosphorothioate 3'-Internucleotide Linkage
  misc_feature (30)..(30): Phosphorothioate 3'-Internucleotide Linkage
aagaccaagccgaaaggcgagucaaggucucucccaug

SEQ ID NO: 4484 - RNA, 38 nt, Artificial Sequence
  Description of Artificial Sequence:  Enzymatic Nucleic Acid
  misc_feature (11)..(16): Phosphorothioate 3'-Internucleotide Linkage
  misc_feature (20)..(20): Phosphorothioate 3'-Internucleotide Linkage
  misc_feature (22)..(22): Phosphorothioate 3'-Internucleotide Linkage
  misc_feature (24)..(25): Phosphorothioate 3'-Internucleotide Linkage
  misc_feature (28)..(28): Phosphorothioate 3'-Internucleotide Linkage
  misc_feature (30)..(30): Phosphorothioate 3'-Internucleotide Linkage
uuggaagagccgaaaggcgagucaaggucucaaccucc

SEQ ID NO: 4485 - RNA, 38 nt, Artificial Sequence
  Description of Artificial Sequence:  Enzymatic Nucleic Acid
  misc_feature (11)..(16): Phosphorothioate 3'-Internucleotide Linkage
  misc_feature (20)..(20): Phosphorothioate 3'-Internucleotide Linkage
  misc_feature (22)..(22): Phosphorothioate 3'-Internucleotide Linkage
  misc_feature (24)..(25): Phosphorothioate 3'-Internucleotide Linkage
  misc_feature (28)..(28): Phosphorothioate 3'-Internucleotide Linkage
  misc_feature (30)..(30): Phosphorothioate 3'-Internucleotide Linkage
uccccauggccgaaaggcgagucaaggucucuuuucga

SEQ ID NO: 4486 - RNA, 38 nt, Artificial Sequence
  Description of Artificial Sequence:  Enzymatic Nucleic Acid
  misc_feature (11)..(16): Phosphorothioate 3'-Internucleotide Linkage
  misc_feature (20)..(20): Phosphorothioate 3'-Internucleotide Linkage
  misc_feature (22)..(22): Phosphorothioate 3'-Internucleotide Linkage
  misc_feature (24)..(25): Phosphorothioate 3'-Internucleotide Linkage
  misc_feature (28)..(28): Phosphorothioate 3'-Internucleotide Linkage
  misc_feature (30)..(30): Phosphorothioate 3'-Internucleotide Linkage
ggguccaagccgaaaggcgagucaaggucuugaugauc

SEQ ID NO: 4487 - RNA, 38 nt, Artificial Sequence
  Description of Artificial Sequence:  Enzymatic Nucleic Acid
  misc_feature (11)..(16): Phosphorothioate 3'-Internucleotide Linkage
  misc_feature (20)..(20): Phosphorothioate 3'-Internucleotide Linkage
  misc_feature (22)..(22): Phosphorothioate 3'-Internucleotide Linkage
  misc_feature (24)..(25): Phosphorothioate 3'-Internucleotide Linkage
  misc_feature (28)..(28): Phosphorothioate 3'-Internucleotide Linkage
  misc_feature (30)..(30): Phosphorothioate 3'-Internucleotide Linkage
ugaguugggccgaaaggcgagucaaggucuuuugaaug

SEQ ID NO: 4488 - RNA, 38 nt, Artificial Sequence
  Description of Artificial Sequence:  Enzymatic Nucleic Acid
  misc_feature (11)..(16): Phosphorothioate 3'-Internucleotide Linkage
  misc_feature (20)..(20): Phosphorothioate 3'-Internucleotide Linkage
  misc_feature (22)..(22): Phosphorothioate 3'-Internucleotide Linkage
  misc_feature (24)..(25): Phosphorothioate 3'-Internucleotide Linkage
  misc_feature (28)..(28): Phosphorothioate 3'-Internucleotide Linkage
  misc_feature (30)..(30): Phosphorothioate 3'-Internucleotide Linkage
uggauuuagccgaaaggcgagucaaggucuugaguugg

SEQ ID NO: 4489 - RNA, 38 nt, Artificial Sequence
  Description of Artificial Sequence:  Enzymatic Nucleic Acid
  misc_feature (11)..(16): Phosphorothioate 3'-Internucleotide Linkage
  misc_feature (20)..(20): Phosphorothioate 3'-Internucleotide Linkage
  misc_feature (22)..(22): Phosphorothioate 3'-Internucleotide Linkage
  misc_feature (24)..(25): Phosphorothioate 3'-Internucleotide Linkage
  misc_feature (28)..(28): Phosphorothioate 3'-Internucleotide Linkage
  misc_feature (30)..(30): Phosphorothioate 3'-Internucleotide Linkage
gcguccgggccgaaaggcgagucaaggucucaguuguc

SEQ ID NO: 4490 - RNA, 38 nt, Artificial Sequence
  Description of Artificial Sequence:  Enzymatic Nucleic Acid
  misc_feature (11)..(16): Phosphorothioate 3'-Internucleotide Linkage
  misc_feature (20)..(20): Phosphorothioate 3'-Internucleotide Linkage
  misc_feature (22)..(22): Phosphorothioate 3'-Internucleotide Linkage
  misc_feature (24)..(25): Phosphorothioate 3'-Internucleotide Linkage
  misc_feature (28)..(28): Phosphorothioate 3'-Internucleotide Linkage
  misc_feature (30)..(30): Phosphorothioate 3'-Internucleotide Linkage
cacucccagccgaaaggcgagucaaggucucuuguugg

SEQ ID NO: 4491 - RNA, 38 nt, Artificial Sequence
  Description of Artificial Sequence:  Enzymatic Nucleic Acid
  misc_feature (11)..(16): Phosphorothioate 3'-Internucleotide Linkage
  misc_feature (20)..(20): Phosphorothioate 3'-Internucleotide Linkage
  misc_feature (22)..(22): Phosphorothioate 3'-Internucleotide Linkage
  misc_feature (24)..(25): Phosphorothioate 3'-Internucleotide Linkage
  misc_feature (28)..(28): Phosphorothioate 3'-Internucleotide Linkage
  misc_feature (30)..(30): Phosphorothioate 3'-Internucleotide Linkage
ugcucccagccgaaaggcgagucaaggucuucccaccu

SEQ ID NO: 4492 - RNA, 38 nt, Artificial Sequence
  Description of Artificial Sequence:  Enzymatic Nucleic Acid
  misc_feature (11)..(16): Phosphorothioate 3'-Internucleotide Linkage
  misc_feature (20)..(20): Phosphorothioate 3'-Internucleotide Linkage
  misc_feature (22)..(22): Phosphorothioate 3'-Internucleotide Linkage
  misc_feature (24)..(25): Phosphorothioate 3'-Internucleotide Linkage
  misc_feature (28)..(28): Phosphorothioate 3'-Internucleotide Linkage
  misc_feature (30)..(30): Phosphorothioate 3'-Internucleotide Linkage
cccgaauggccgaaaggcgagucaaggucuucccacuc

SEQ ID NO: 4493 - RNA, 38 nt, Artificial Sequence
  Description of Artificial Sequence:  Enzymatic Nucleic Acid
  misc_feature (11)..(16): Phosphorothioate 3'-Internucleotide Linkage
  misc_feature (20)..(20): Phosphorothioate 3'-Internucleotide Linkage
  misc_feature (22)..(22): Phosphorothioate 3'-Internucleotide Linkage
  misc_feature (24)..(25): Phosphorothioate 3'-Internucleotide Linkage
  misc_feature (28)..(28): Phosphorothioate 3'-Internucleotide Linkage
  misc_feature (30)..(30): Phosphorothioate 3'-Internucleotide Linkage
aacccugggccgaaaggcgagucaaggucuccgaaugc

SEQ ID NO: 4494 - RNA, 38 nt, Artificial Sequence
  Description of Artificial Sequence:  Enzymatic Nucleic Acid
  misc_feature (11)..(16): Phosphorothioate 3'-Internucleotide Linkage
  misc_feature (20)..(20): Phosphorothioate 3'-Internucleotide Linkage
  misc_feature (22)..(22): Phosphorothioate 3'-Internucleotide Linkage
  misc_feature (24)..(25): Phosphorothioate 3'-Internucleotide Linkage
  misc_feature (28)..(28): Phosphorothioate 3'-Internucleotide Linkage
  misc_feature (30)..(30): Phosphorothioate 3'-Internucleotide Linkage
ggggugaagccgaaaggcgagucaaggucuccuggccc

SEQ ID NO: 4495 - RNA, 38 nt, Artificial Sequence
  Description of Artificial Sequence:  Enzymatic Nucleic Acid
  misc_feature (11)..(16): Phosphorothioate 3'-Internucleotide Linkage
  misc_feature (20)..(20): Phosphorothioate 3'-Internucleotide Linkage
  misc_feature (22)..(22): Phosphorothioate 3'-Internucleotide Linkage
  misc_feature (24)..(25): Phosphorothioate 3'-Internucleotide Linkage
  misc_feature (28)..(28): Phosphorothioate 3'-Internucleotide Linkage
  misc_feature (30)..(30): Phosphorothioate 3'-Internucleotide Linkage
gggcuccagccgaaaggcgagucaaggucucccaacag

SEQ ID NO: 4496 - RNA, 38 nt, Artificial Sequence
  Description of Artificial Sequence:  Enzymatic Nucleic Acid
  misc_feature (11)..(16): Phosphorothioate 3'-Internucleotide Linkage
  misc_feature (20)..(20): Phosphorothioate 3'-Internucleotide Linkage
  misc_feature (22)..(22): Phosphorothioate 3'-Internucleotide Linkage
  misc_feature (24)..(25): Phosphorothioate 3'-Internucleotide Linkage
  misc_feature (28)..(28): Phosphorothioate 3'-Internucleotide Linkage
  misc_feature (30)..(30): Phosphorothioate 3'-Internucleotide Linkage
cgugaggggccgaaaggcgagucaaggucuuccacccc

SEQ ID NO: 4497 - RNA, 38 nt, Artificial Sequence
  Description of Artificial Sequence:  Enzymatic Nucleic Acid
  misc_feature (11)..(16): Phosphorothioate 3'-Internucleotide Linkage
  misc_feature (20)..(20): Phosphorothioate 3'-Internucleotide Linkage
  misc_feature (22)..(22): Phosphorothioate 3'-Internucleotide Linkage
  misc_feature (24)..(25): Phosphorothioate 3'-Internucleotide Linkage
  misc_feature (28)..(28): Phosphorothioate 3'-Internucleotide Linkage
  misc_feature (30)..(30): Phosphorothioate 3'-Internucleotide Linkage
ugaguagggccgaaaggcgagucaaggucuccugagcg

SEQ ID NO: 4498 - RNA, 38 nt, Artificial Sequence
  Description of Artificial Sequence:  Enzymatic Nucleic Acid
  misc_feature (11)..(16): Phosphorothioate 3'-Internucleotide Linkage
  misc_feature (20)..(20): Phosphorothioate 3'-Internucleotide Linkage
  misc_feature (22)..(22): Phosphorothioate 3'-Internucleotide Linkage
  misc_feature (24)..(25): Phosphorothioate 3'-Internucleotide Linkage
  misc_feature (28)..(28): Phosphorothioate 3'-Internucleotide Linkage
  misc_feature (30)..(30): Phosphorothioate 3'-Internucleotide Linkage
aggagcuggccgaaaggcgagucaaggucuuggcacag

SEQ ID NO: 4499 - RNA, 38 nt, Artificial Sequence
  Description of Artificial Sequence:  Enzymatic Nucleic Acid
  misc_feature (11)..(16): Phosphorothioate 3'-Internucleotide Linkage
  misc_feature (20)..(20): Phosphorothioate 3'-Internucleotide Linkage
  misc_feature (22)..(22): Phosphorothioate 3'-Internucleotide Linkage
  misc_feature (24)..(25): Phosphorothioate 3'-Internucleotide Linkage
  misc_feature (28)..(28): Phosphorothioate 3'-Internucleotide Linkage
  misc_feature (30)..(30): Phosphorothioate 3'-Internucleotide Linkage
aggaggaggccgaaaggcgagucaaggucuugcuggca

SEQ ID NO: 4500 - RNA, 38 nt, Artificial Sequence
  Description of Artificial Sequence:  Enzymatic Nucleic Acid
  misc_feature (11)..(16): Phosphorothioate 3'-Internucleotide Linkage
  misc_feature (20)..(20): Phosphorothioate 3'-Internucleotide Linkage
  misc_feature (22)..(22): Phosphorothioate 3'-Internucleotide Linkage
  misc_feature (24)..(25): Phosphorothioate 3'-Internucleotide Linkage
  misc_feature (28)..(28): Phosphorothioate 3'-Internucleotide Linkage
  misc_feature (30)..(30): Phosphorothioate 3'-Internucleotide Linkage
ccugacuggccgaaaggcgagucaaggucucgauuggu

SEQ ID NO: 4501 - RNA, 38 nt, Artificial Sequence
  Description of Artificial Sequence:  Enzymatic Nucleic Acid
  misc_feature (11)..(16): Phosphorothioate 3'-Internucleotide Linkage
  misc_feature (20)..(20): Phosphorothioate 3'-Internucleotide Linkage
  misc_feature (22)..(22): Phosphorothioate 3'-Internucleotide Linkage
  misc_feature (24)..(25): Phosphorothioate 3'-Internucleotide Linkage
  misc_feature (28)..(28): Phosphorothioate 3'-Internucleotide Linkage
  misc_feature (30)..(30): Phosphorothioate 3'-Internucleotide Linkage
cuuccugagccgaaaggcgagucaaggucuugccgauu

SEQ ID NO: 4502 - RNA, 38 nt, Artificial Sequence
  Description of Artificial Sequence:  Enzymatic Nucleic Acid
  misc_feature (11)..(16): Phosphorothioate 3'-Internucleotide Linkage
  misc_feature (20)..(20): Phosphorothioate 3'-Internucleotide Linkage
  misc_feature (22)..(22): Phosphorothioate 3'-Internucleotide Linkage
  misc_feature (24)..(25): Phosphorothioate 3'-Internucleotide Linkage
  misc_feature (28)..(28): Phosphorothioate 3'-Internucleotide Linkage
  misc_feature (30)..(30): Phosphorothioate 3'-Internucleotide Linkage
guaggcuggccgaaaggcgagucaaggucucuuccuga

SEQ ID NO: 4503 - RNA, 38 nt, Artificial Sequence
  Description of Artificial Sequence:  Enzymatic Nucleic Acid
  misc_feature (11)..(16): Phosphorothioate 3'-Internucleotide Linkage
  misc_feature (20)..(20): Phosphorothioate 3'-Internucleotide Linkage
  misc_feature (22)..(22): Phosphorothioate 3'-Internucleotide Linkage
  misc_feature (24)..(25): Phosphorothioate 3'-Internucleotide Linkage
  misc_feature (28)..(28): Phosphorothioate 3'-Internucleotide Linkage
  misc_feature (30)..(30): Phosphorothioate 3'-Internucleotide Linkage
ggaguagggccgaaaggcgagucaaggucuugccuucc

SEQ ID NO: 4504 - RNA, 38 nt, Artificial Sequence
  Description of Artificial Sequence:  Enzymatic Nucleic Acid
  misc_feature (11)..(16): Phosphorothioate 3'-Internucleotide Linkage
  misc_feature (20)..(20): Phosphorothioate 3'-Internucleotide Linkage
  misc_feature (22)..(22): Phosphorothioate 3'-Internucleotide Linkage
  misc_feature (24)..(25): Phosphorothioate 3'-Internucleotide Linkage
  misc_feature (28)..(28): Phosphorothioate 3'-Internucleotide Linkage
  misc_feature (30)..(30): Phosphorothioate 3'-Internucleotide Linkage
cugcaugggccgaaaggcgagucaaggucucugaggau

SEQ ID NO: 4505 - DNA, 31 bp, Artificial Sequence
  Description of Artificial Sequence:  Enzymatic Nucleic Acid
tggtccggggctagctacaacgagctggttg

SEQ ID NO: 4506 - DNA, 31 bp, Artificial Sequence
  Description of Artificial Sequence:  Enzymatic Nucleic Acid
ggttcctgggctagctacaacgagggcgttc

SEQ ID NO: 4507 - DNA, 31 bp, Artificial Sequence
  Description of Artificial Sequence:  Enzymatic Nucleic Acid
tgtccttgggctagctacaacgagcgggttg

SEQ ID NO: 4508 - DNA, 31 bp, Artificial Sequence
  Description of Artificial Sequence:  Enzymatic Nucleic Acid
gccaccagggctagctacaacgaaggaaagt

SEQ ID NO: 4509 - DNA, 31 bp, Artificial Sequence
  Description of Artificial Sequence:  Enzymatic Nucleic Acid
attctgagggctagctacaacgaagggctca

SEQ ID NO: 4510 - DNA, 31 bp, Artificial Sequence
  Description of Artificial Sequence:  Enzymatic Nucleic Acid
cgatatggggctagctacaacgaagagacag

SEQ ID NO: 4511 - DNA, 31 bp, Artificial Sequence
  Description of Artificial Sequence:  Enzymatic Nucleic Acid
tcctgatgggctagctacaacgagatgttct

SEQ ID NO: 4512 - DNA, 31 bp, Artificial Sequence
  Description of Artificial Sequence:  Enzymatic Nucleic Acid
aacacgagggctagctacaacgaaggggtcc

SEQ ID NO: 4513 - DNA, 31 bp, Artificial Sequence
  Description of Artificial Sequence:  Enzymatic Nucleic Acid
tgggactgggctagctacaacgagaattttg

SEQ ID NO: 4514 - DNA, 31 bp, Artificial Sequence
  Description of Artificial Sequence:  Enzymatic Nucleic Acid
acatccagggctagctacaacgagataacca

SEQ ID NO: 4515 - DNA, 31 bp, Artificial Sequence
  Description of Artificial Sequence:  Enzymatic Nucleic Acid
aaacgccgggctagctacaacgaagacacat

SEQ ID NO: 4516 - DNA, 31 bp, Artificial Sequence
  Description of Artificial Sequence:  Enzymatic Nucleic Acid
gcaggatgggctagctacaacgaagaggaag

SEQ ID NO: 4517 - DNA, 31 bp, Artificial Sequence
  Description of Artificial Sequence:  Enzymatic Nucleic Acid
catagcagggctagctacaacgaaggatgca

SEQ ID NO: 4518 - DNA, 31 bp, Artificial Sequence
  Description of Artificial Sequence:  Enzymatic Nucleic Acid
aggcatagggctagctacaacgaagcaggat

SEQ ID NO: 4519 - DNA, 31 bp, Artificial Sequence
  Description of Artificial Sequence:  Enzymatic Nucleic Acid
agatgaggggctagctacaacgaatagcagc

SEQ ID NO: 4520 - DNA, 31 bp, Artificial Sequence
  Description of Artificial Sequence:  Enzymatic Nucleic Acid
caaacgggggctagctacaacgaaacatacc

SEQ ID NO: 4521 - DNA, 31 bp, Artificial Sequence
  Description of Artificial Sequence:  Enzymatic Nucleic Acid
aggttttgggctagctacaacgaatggtccg

SEQ ID NO: 4522 - DNA, 31 bp, Artificial Sequence
  Description of Artificial Sequence:  Enzymatic Nucleic Acid
gagttgtgggctagctacaacgaaggttttg

SEQ ID NO: 4523 - DNA, 31 bp, Artificial Sequence
  Description of Artificial Sequence:  Enzymatic Nucleic Acid
tccttgagggctagctacaacgaaggagttg

SEQ ID NO: 4524 - DNA, 31 bp, Artificial Sequence
  Description of Artificial Sequence:  Enzymatic Nucleic Acid
ttgtacagggctagctacaacgaaacatgag

SEQ ID NO: 4525 - DNA, 31 bp, Artificial Sequence
  Description of Artificial Sequence:  Enzymatic Nucleic Acid
tacaggtgggctagctacaacgaagtttccg

SEQ ID NO: 4526 - DNA, 31 bp, Artificial Sequence
  Description of Artificial Sequence:  Enzymatic Nucleic Acid
gtattttgggctagctacaacgagaaagccc

SEQ ID NO: 4527 - DNA, 31 bp, Artificial Sequence
  Description of Artificial Sequence:  Enzymatic Nucleic Acid
acaaatggggctagctacaacgaactagtaa

SEQ ID NO: 4528 - DNA, 31 bp, Artificial Sequence
  Description of Artificial Sequence:  Enzymatic Nucleic Acid
aacagcggggctagctacaacgaataaaggg

SEQ ID NO: 4529 - DNA, 31 bp, Artificial Sequence
  Description of Artificial Sequence:  Enzymatic Nucleic Acid
ggtaacagggctagctacaacgaggcataaa

SEQ ID NO: 4530 - DNA, 31 bp, Artificial Sequence
  Description of Artificial Sequence:  Enzymatic Nucleic Acid
tcctgtggggctagctacaacgaaatgtgcc

SEQ ID NO: 4531 - DNA, 31 bp, Artificial Sequence
  Description of Artificial Sequence:  Enzymatic Nucleic Acid
aggggcggggctagctacaacgaaaacccca

SEQ ID NO: 4532 - DNA, 31 bp, Artificial Sequence
  Description of Artificial Sequence:  Enzymatic Nucleic Acid
gaaaggggggctagctacaacgaggcaaacc

SEQ ID NO: 4533 - DNA, 31 bp, Artificial Sequence
  Description of Artificial Sequence:  Enzymatic Nucleic Acid
ccacattgggctagctacaacgagtgaaagg

SEQ ID NO: 4534 - DNA, 31 bp, Artificial Sequence
  Description of Artificial Sequence:  Enzymatic Nucleic Acid
cattaaagggctagctacaacgaagaatatc

SEQ ID NO: 4535 - DNA, 31 bp, Artificial Sequence
  Description of Artificial Sequence:  Enzymatic Nucleic Acid
tataaaggggctagctacaacgaattaaagc

SEQ ID NO: 4536 - DNA, 31 bp, Artificial Sequence
  Description of Artificial Sequence:  Enzymatic Nucleic Acid
tatgcatgggctagctacaacgaatataaag

SEQ ID NO: 4537 - DNA, 31 bp, Artificial Sequence
  Description of Artificial Sequence:  Enzymatic Nucleic Acid
cttgtatgggctagctacaacgaatgcatat

SEQ ID NO: 4538 - DNA, 31 bp, Artificial Sequence
  Description of Artificial Sequence:  Enzymatic Nucleic Acid
taagttggggctagctacaacgagagaaagt

SEQ ID NO: 4539 - DNA, 31 bp, Artificial Sequence
  Description of Artificial Sequence:  Enzymatic Nucleic Acid
ttgccgagggctagctacaacgaaacggggt

SEQ ID NO: 4540 - DNA, 31 bp, Artificial Sequence
  Description of Artificial Sequence:  Enzymatic Nucleic Acid
acacttggggctagctacaacgaatagacca

SEQ ID NO: 4541 - DNA, 31 bp, Artificial Sequence
  Description of Artificial Sequence:  Enzymatic Nucleic Acid
tgcgtcagggctagctacaacgaaaacactt

SEQ ID NO: 4542 - DNA, 31 bp, Artificial Sequence
  Description of Artificial Sequence:  Enzymatic Nucleic Acid
gggggttgggctagctacaacgagtcagcaa

SEQ ID NO: 4543 - DNA, 31 bp, Artificial Sequence
  Description of Artificial Sequence:  Enzymatic Nucleic Acid
cacgcatgggctagctacaacgagctgatgg

SEQ ID NO: 4544 - DNA, 31 bp, Artificial Sequence
  Description of Artificial Sequence:  Enzymatic Nucleic Acid
gttccacgggctagctacaacgaatgcgctg

SEQ ID NO: 4545 - DNA, 31 bp, Artificial Sequence
  Description of Artificial Sequence:  Enzymatic Nucleic Acid
tggatcggggctagctacaacgaagaggaga

SEQ ID NO: 4546 - DNA, 31 bp, Artificial Sequence
  Description of Artificial Sequence:  Enzymatic Nucleic Acid
gagttccgggctagctacaacgaggtatgga

SEQ ID NO: 4547 - DNA, 31 bp, Artificial Sequence
  Description of Artificial Sequence:  Enzymatic Nucleic Acid
aaaacaagggctagctacaacgaggctagga

SEQ ID NO: 4548 - DNA, 31 bp, Artificial Sequence
  Description of Artificial Sequence:  Enzymatic Nucleic Acid
gctgcgagggctagctacaacgaaaaacaag

SEQ ID NO: 4549 - DNA, 31 bp, Artificial Sequence
  Description of Artificial Sequence:  Enzymatic Nucleic Acid
acctgctgggctagctacaacgagagcaaaa

SEQ ID NO: 4550 - DNA, 31 bp, Artificial Sequence
  Description of Artificial Sequence:  Enzymatic Nucleic Acid
cgggagagggctagctacaacgaacgacaga

SEQ ID NO: 4551 - DNA, 31 bp, Artificial Sequence
  Description of Artificial Sequence:  Enzymatic Nucleic Acid
tatatttgggctagctacaacgagggagagc

SEQ ID NO: 4552 - DNA, 31 bp, Artificial Sequence
  Description of Artificial Sequence:  Enzymatic Nucleic Acid
cagcctagggctagctacaacgaagccatgg

SEQ ID NO: 4553 - DNA, 31 bp, Artificial Sequence
  Description of Artificial Sequence:  Enzymatic Nucleic Acid
gttggcagggctagctacaacgaacagccta

SEQ ID NO: 4554 - DNA, 31 bp, Artificial Sequence
  Description of Artificial Sequence:  Enzymatic Nucleic Acid
ccagttggggctagctacaacgaagcacagc

SEQ ID NO: 4555 - DNA, 31 bp, Artificial Sequence
  Description of Artificial Sequence:  Enzymatic Nucleic Acid
acgtcccgggctagctacaacgagtaggatc

SEQ ID NO: 4556 - DNA, 31 bp, Artificial Sequence
  Description of Artificial Sequence:  Enzymatic Nucleic Acid
ggattcagggctagctacaacgagccgacgg

SEQ ID NO: 4557 - DNA, 31 bp, Artificial Sequence
  Description of Artificial Sequence:  Enzymatic Nucleic Acid
gtcgtccgggctagctacaacgagggattca

SEQ ID NO: 4558 - DNA, 31 bp, Artificial Sequence
  Description of Artificial Sequence:  Enzymatic Nucleic Acid
gccccaagggctagctacaacgaggccccgg

SEQ ID NO: 4559 - DNA, 31 bp, Artificial Sequence
  Description of Artificial Sequence:  Enzymatic Nucleic Acid
gaagcgggggctagctacaacgaggtagagc

SEQ ID NO: 4560 - DNA, 31 bp, Artificial Sequence
  Description of Artificial Sequence:  Enzymatic Nucleic Acid
cggagaagggctagctacaacgagggcggta

SEQ ID NO: 4561 - DNA, 31 bp, Artificial Sequence
  Description of Artificial Sequence:  Enzymatic Nucleic Acid
acaataggggctagctacaacgaggagaagc

SEQ ID NO: 4562 - DNA, 31 bp, Artificial Sequence
  Description of Artificial Sequence:  Enzymatic Nucleic Acid
gagaggtgggctagctacaacgagccccgtg

SEQ ID NO: 4563 - DNA, 31 bp, Artificial Sequence
  Description of Artificial Sequence:  Enzymatic Nucleic Acid
ggagtccgggctagctacaacgagtaaagag

SEQ ID NO: 4564 - DNA, 31 bp, Artificial Sequence
  Description of Artificial Sequence:  Enzymatic Nucleic Acid
tgagaaggggctagctacaacgaacagacgg

SEQ ID NO: 4565 - DNA, 31 bp, Artificial Sequence
  Description of Artificial Sequence:  Enzymatic Nucleic Acid
cggtccggggctagctacaacgaagatgaga

SEQ ID NO: 4566 - DNA, 31 bp, Artificial Sequence
  Description of Artificial Sequence:  Enzymatic Nucleic Acid
gcgaagtgggctagctacaacgaacacggtc

SEQ ID NO: 4567 - DNA, 31 bp, Artificial Sequence
  Description of Artificial Sequence:  Enzymatic Nucleic Acid
aggtgaagggctagctacaacgagaagtgca

SEQ ID NO: 4568 - DNA, 31 bp, Artificial Sequence
  Description of Artificial Sequence:  Enzymatic Nucleic Acid
gcgacgtgggctagctacaacgaagaggtga

SEQ ID NO: 4569 - DNA, 31 bp, Artificial Sequence
  Description of Artificial Sequence:  Enzymatic Nucleic Acid
tctccatgggctagctacaacgagacgtgca

SEQ ID NO: 4570 - DNA, 31 bp, Artificial Sequence
  Description of Artificial Sequence:  Enzymatic Nucleic Acid
cctgtgggggctagctacaacgagttcacgg

SEQ ID NO: 4571 - DNA, 31 bp, Artificial Sequence
  Description of Artificial Sequence:  Enzymatic Nucleic Acid
accttgggggctagctacaacgaaggttcct

SEQ ID NO: 4572 - DNA, 31 bp, Artificial Sequence
  Description of Artificial Sequence:  Enzymatic Nucleic Acid
ctcttatgggctagctacaacgaaagacctt

SEQ ID NO: 4573 - DNA, 31 bp, Artificial Sequence
  Description of Artificial Sequence:  Enzymatic Nucleic Acid
aaaagttgggctagctacaacgaatggtgct

SEQ ID NO: 4574 - DNA, 31 bp, Artificial Sequence
  Description of Artificial Sequence:  Enzymatic Nucleic Acid
tgattaggggctagctacaacgaagaggtga

SEQ ID NO: 4575 - DNA, 31 bp, Artificial Sequence
  Description of Artificial Sequence:  Enzymatic Nucleic Acid
acccaaggggctagctacaacgaacagcttg

SEQ ID NO: 4576 - DNA, 31 bp, Artificial Sequence
  Description of Artificial Sequence:  Enzymatic Nucleic Acid
tcagaaggggctagctacaacgaaaaaaaga

SEQ ID NO: 4577 - DNA, 31 bp, Artificial Sequence
  Description of Artificial Sequence:  Enzymatic Nucleic Acid
agcagaggggctagctacaacgaggtgtcga

SEQ ID NO: 4578 - DNA, 31 bp, Artificial Sequence
  Description of Artificial Sequence:  Enzymatic Nucleic Acid
atacagagggctagctacaacgaagaggcgg

SEQ ID NO: 4579 - DNA, 31 bp, Artificial Sequence
  Description of Artificial Sequence:  Enzymatic Nucleic Acid
gaggagtgggctagctacaacgagaatccac

SEQ ID NO: 4580 - DNA, 31 bp, Artificial Sequence
  Description of Artificial Sequence:  Enzymatic Nucleic Acid
tctatatgggctagctacaacgaaggaggag

SEQ ID NO: 4581 - DNA, 31 bp, Artificial Sequence
  Description of Artificial Sequence:  Enzymatic Nucleic Acid
gataggggggctagctacaacgaatttggtg

SEQ ID NO: 4582 - DNA, 31 bp, Artificial Sequence
  Description of Artificial Sequence:  Enzymatic Nucleic Acid
ctgcgaggggctagctacaacgagagggagt

SEQ ID NO: 4583 - DNA, 31 bp, Artificial Sequence
  Description of Artificial Sequence:  Enzymatic Nucleic Acid
ttcgtctgggctagctacaacgagaggcgag

SEQ ID NO: 4584 - DNA, 31 bp, Artificial Sequence
  Description of Artificial Sequence:  Enzymatic Nucleic Acid
cgacgcggggctagctacaacgagattgaga

SEQ ID NO: 4585 - DNA, 31 bp, Artificial Sequence
  Description of Artificial Sequence:  Enzymatic Nucleic Acid
ctgcgacgggctagctacaacgaggcgattg

SEQ ID NO: 4586 - DNA, 31 bp, Artificial Sequence
  Description of Artificial Sequence:  Enzymatic Nucleic Acid
atcttctgggctagctacaacgagacgcggc

SEQ ID NO: 4587 - DNA, 31 bp, Artificial Sequence
  Description of Artificial Sequence:  Enzymatic Nucleic Acid
gattaaagggctagctacaacgaaaggtacc

SEQ ID NO: 4588 - DNA, 31 bp, Artificial Sequence
  Description of Artificial Sequence:  Enzymatic Nucleic Acid
tcctcctgggctagctacaacgaaaatgaat

SEQ ID NO: 4589 - DNA, 31 bp, Artificial Sequence
  Description of Artificial Sequence:  Enzymatic Nucleic Acid
ctagcaggggctagctacaacgaatagttaa

SEQ ID NO: 4590 - DNA, 31 bp, Artificial Sequence
  Description of Artificial Sequence:  Enzymatic Nucleic Acid
aaacctagggctagctacaacgaaggcatag

SEQ ID NO: 4591 - DNA, 31 bp, Artificial Sequence
  Description of Artificial Sequence:  Enzymatic Nucleic Acid
tctaagggggctagctacaacgaaaatattt

SEQ ID NO: 4592 - DNA, 31 bp, Artificial Sequence
  Description of Artificial Sequence:  Enzymatic Nucleic Acid
taatgtcgggctagctacaacgagtctggaa

SEQ ID NO: 4593 - DNA, 31 bp, Artificial Sequence
  Description of Artificial Sequence:  Enzymatic Nucleic Acid
aaatgaggggctagctacaacgagctacgtg

SEQ ID NO: 4594 - DNA, 31 bp, Artificial Sequence
  Description of Artificial Sequence:  Enzymatic Nucleic Acid
gtgacccgggctagctacaacgaaaaatgag

SEQ ID NO: 4595 - DNA, 31 bp, Artificial Sequence
  Description of Artificial Sequence:  Enzymatic Nucleic Acid
tttgaatgggctagctacaacgaagggtcca

SEQ ID NO: 4596 - DNA, 31 bp, Artificial Sequence
  Description of Artificial Sequence:  Enzymatic Nucleic Acid
tccttgtgggctagctacaacgagggttgag

SEQ ID NO: 4597 - DNA, 31 bp, Artificial Sequence
  Description of Artificial Sequence:  Enzymatic Nucleic Acid
cttgttggggctagctacaacgagtccggcc

SEQ ID NO: 4598 - DNA, 31 bp, Artificial Sequence
  Description of Artificial Sequence:  Enzymatic Nucleic Acid
gccctgagggctagctacaacgagtgagggc

SEQ ID NO: 4599 - DNA, 31 bp, Artificial Sequence
  Description of Artificial Sequence:  Enzymatic Nucleic Acid
gctgctggggctagctacaacgaacagttgt

SEQ ID NO: 4600 - DNA, 31 bp, Artificial Sequence
  Description of Artificial Sequence:  Enzymatic Nucleic Acid
ggtggaggggctagctacaacgaaggaggag

SEQ ID NO: 4601 - DNA, 31 bp, Artificial Sequence
  Description of Artificial Sequence:  Enzymatic Nucleic Acid
ggaaagtaggctagctacaacgaagggccct

SEQ ID NO: 4602 - DNA, 31 bp, Artificial Sequence
  Description of Artificial Sequence:  Enzymatic Nucleic Acid
ggcagagaggctagctacaacgaagtattct

SEQ ID NO: 4603 - DNA, 31 bp, Artificial Sequence
  Description of Artificial Sequence:  Enzymatic Nucleic Acid
gttcggtaggctagctacaacgaagggtccc

SEQ ID NO: 4604 - DNA, 31 bp, Artificial Sequence
  Description of Artificial Sequence:  Enzymatic Nucleic Acid
gcctgtaaggctagctacaacgaacgagcag

SEQ ID NO: 4605 - DNA, 31 bp, Artificial Sequence
  Description of Artificial Sequence:  Enzymatic Nucleic Acid
tttgtcaaggctagctacaacgaaagaaaaa

SEQ ID NO: 4606 - DNA, 31 bp, Artificial Sequence
  Description of Artificial Sequence:  Enzymatic Nucleic Acid
ccaagacaggctagctacaacgaacgggtgt

SEQ ID NO: 4607 - DNA, 31 bp, Artificial Sequence
  Description of Artificial Sequence:  Enzymatic Nucleic Acid
ggccaagaggctagctacaacgaacacgggt

SEQ ID NO: 4608 - DNA, 31 bp, Artificial Sequence
  Description of Artificial Sequence:  Enzymatic Nucleic Acid
gaggacaaggctagctacaacgaaggttggt

SEQ ID NO: 4609 - DNA, 31 bp, Artificial Sequence
  Description of Artificial Sequence:  Enzymatic Nucleic Acid
ttggaggaggctagctacaacgaaacaggtt

SEQ ID NO: 4610 - DNA, 31 bp, Artificial Sequence
  Description of Artificial Sequence:  Enzymatic Nucleic Acid
aaccaggaggctagctacaacgaaaattgga

SEQ ID NO: 4611 - DNA, 31 bp, Artificial Sequence
  Description of Artificial Sequence:  Enzymatic Nucleic Acid
cgcagacaggctagctacaacgaatccagcg

SEQ ID NO: 4612 - DNA, 31 bp, Artificial Sequence
  Description of Artificial Sequence:  Enzymatic Nucleic Acid
gccgcagaggctagctacaacgaacatccag

SEQ ID NO: 4613 - DNA, 31 bp, Artificial Sequence
  Description of Artificial Sequence:  Enzymatic Nucleic Acid
agaaccaaggctagctacaacgaaagaagat

SEQ ID NO: 4614 - DNA, 31 bp, Artificial Sequence
  Description of Artificial Sequence:  Enzymatic Nucleic Acid
acgggcaaggctagctacaacgaataccttg

SEQ ID NO: 4615 - DNA, 31 bp, Artificial Sequence
  Description of Artificial Sequence:  Enzymatic Nucleic Acid
ttagaggaggctagctacaacgaaaacgggc

SEQ ID NO: 4616 - DNA, 31 bp, Artificial Sequence
  Description of Artificial Sequence:  Enzymatic Nucleic Acid
gagggaaaggctagctacaacgaatagaggt

SEQ ID NO: 4617 - DNA, 31 bp, Artificial Sequence
  Description of Artificial Sequence:  Enzymatic Nucleic Acid
tacagcaaggctagctacaacgaatgaggga

SEQ ID NO: 4618 - DNA, 31 bp, Artificial Sequence
  Description of Artificial Sequence:  Enzymatic Nucleic Acid
gttttgtaggctagctacaacgaagcaacat

SEQ ID NO: 4619 - DNA, 31 bp, Artificial Sequence
  Description of Artificial Sequence:  Enzymatic Nucleic Acid
tgggaataggctagctacaacgaaggtgcag

SEQ ID NO: 4620 - DNA, 31 bp, Artificial Sequence
  Description of Artificial Sequence:  Enzymatic Nucleic Acid
ccactgaaggctagctacaacgaaaatggca

SEQ ID NO: 4621 - DNA, 31 bp, Artificial Sequence
  Description of Artificial Sequence:  Enzymatic Nucleic Acid
aagccagaggctagctacaacgaagtggggg

SEQ ID NO: 4622 - DNA, 31 bp, Artificial Sequence
  Description of Artificial Sequence:  Enzymatic Nucleic Acid
caaaaccaggctagctacaacgaatcatcca

SEQ ID NO: 4623 - DNA, 31 bp, Artificial Sequence
  Description of Artificial Sequence:  Enzymatic Nucleic Acid
atgttgtaggctagctacaacgaagacttgg

SEQ ID NO: 4624 - DNA, 31 bp, Artificial Sequence
  Description of Artificial Sequence:  Enzymatic Nucleic Acid
attggtaaggctagctacaacgaagcggcat

SEQ ID NO: 4625 - DNA, 31 bp, Artificial Sequence
  Description of Artificial Sequence:  Enzymatic Nucleic Acid
cccaaagaggctagctacaacgaaaaagaaa

SEQ ID NO: 4626 - DNA, 31 bp, Artificial Sequence
  Description of Artificial Sequence:  Enzymatic Nucleic Acid
cccaattaggctagctacaacgaatatccca

SEQ ID NO: 4627 - DNA, 31 bp, Artificial Sequence
  Description of Artificial Sequence:  Enzymatic Nucleic Acid
tttttgtaggctagctacaacgaaatatgtt

SEQ ID NO: 4628 - DNA, 31 bp, Artificial Sequence
  Description of Artificial Sequence:  Enzymatic Nucleic Acid
ctaaaacaggctagctacaacgaattttgat

SEQ ID NO: 4629 - DNA, 31 bp, Artificial Sequence
  Description of Artificial Sequence:  Enzymatic Nucleic Acid
tcctaaaaggctagctacaacgaacattttg

SEQ ID NO: 4630 - DNA, 31 bp, Artificial Sequence
  Description of Artificial Sequence:  Enzymatic Nucleic Acid
cctgtttaggctagctacaacgaaggaagtt

SEQ ID NO: 4631 - DNA, 31 bp, Artificial Sequence
  Description of Artificial Sequence:  Enzymatic Nucleic Acid
ttcgttgaggctagctacaacgaatactttc

SEQ ID NO: 4632 - DNA, 31 bp, Artificial Sequence
  Description of Artificial Sequence:  Enzymatic Nucleic Acid
aagacccaggctagctacaacgaaattcgtt

SEQ ID NO: 4633 - DNA, 31 bp, Artificial Sequence
  Description of Artificial Sequence:  Enzymatic Nucleic Acid
aatatccaggctagctacaacgaattgcgtg

SEQ ID NO: 4634 - DNA, 31 bp, Artificial Sequence
  Description of Artificial Sequence:  Enzymatic Nucleic Acid
aaggttcaggctagctacaacgaatactgtt

SEQ ID NO: 4635 - DNA, 31 bp, Artificial Sequence
  Description of Artificial Sequence:  Enzymatic Nucleic Acid
tcagcaaaggctagctacaacgaacttggca

SEQ ID NO: 4636 - DNA, 31 bp, Artificial Sequence
  Description of Artificial Sequence:  Enzymatic Nucleic Acid
aggagacaggctagctacaacgaaaaggttc

SEQ ID NO: 4637 - DNA, 31 bp, Artificial Sequence
  Description of Artificial Sequence:  Enzymatic Nucleic Acid
agaggagaggctagctacaacgaacaaaggt

SEQ ID NO: 4638 - DNA, 31 bp, Artificial Sequence
  Description of Artificial Sequence:  Enzymatic Nucleic Acid
gagcaaaaggctagctacaacgaaagcggct

SEQ ID NO: 4639 - DNA, 31 bp, Artificial Sequence
  Description of Artificial Sequence:  Enzymatic Nucleic Acid
gagcacgaggctagctacaacgaagaattgt

SEQ ID NO: 4640 - DNA, 31 bp, Artificial Sequence
  Description of Artificial Sequence:  Enzymatic Nucleic Acid
tggcagcaggctagctacaacgaagcctagc

SEQ ID NO: 4641 - DNA, 31 bp, Artificial Sequence
  Description of Artificial Sequence:  Enzymatic Nucleic Acid
gacgtaaaggctagctacaacgaaaaggacg

SEQ ID NO: 4642 - DNA, 31 bp, Artificial Sequence
  Description of Artificial Sequence:  Enzymatic Nucleic Acid
ggtcggtaggctagctacaacgaaataggcg

SEQ ID NO: 4643 - DNA, 31 bp, Artificial Sequence
  Description of Artificial Sequence:  Enzymatic Nucleic Acid
agaaggcaggctagctacaacgaagacgggg

SEQ ID NO: 4644 - DNA, 31 bp, Artificial Sequence
  Description of Artificial Sequence:  Enzymatic Nucleic Acid
gaagtgcaggctagctacaacgaacggtccg

SEQ ID NO: 4645 - DNA, 31 bp, Artificial Sequence
  Description of Artificial Sequence:  Enzymatic Nucleic Acid
gtcgttgaggctagctacaacgaattgctga

SEQ ID NO: 4646 - DNA, 31 bp, Artificial Sequence
  Description of Artificial Sequence:  Enzymatic Nucleic Acid
taaacacaggctagctacaacgaagtctttg

SEQ ID NO: 4647 - DNA, 31 bp, Artificial Sequence
  Description of Artificial Sequence:  Enzymatic Nucleic Acid
attaaacaggctagctacaacgaacagtctt

SEQ ID NO: 4648 - DNA, 31 bp, Artificial Sequence
  Description of Artificial Sequence:  Enzymatic Nucleic Acid
tcattaaaggctagctacaacgaacacagtc

SEQ ID NO: 4649 - DNA, 31 bp, Artificial Sequence
  Description of Artificial Sequence:  Enzymatic Nucleic Acid
tcctagtaggctagctacaacgaaaagacct

SEQ ID NO: 4650 - DNA, 31 bp, Artificial Sequence
  Description of Artificial Sequence:  Enzymatic Nucleic Acid
tatgcctaggctagctacaacgaagcctcct

SEQ ID NO: 4651 - DNA, 31 bp, Artificial Sequence
  Description of Artificial Sequence:  Enzymatic Nucleic Acid
ggtgaacaggctagctacaacgaaccaattt

SEQ ID NO: 4652 - DNA, 31 bp, Artificial Sequence
  Description of Artificial Sequence:  Enzymatic Nucleic Acid
ctggtgaaggctagctacaacgaacaccaat

SEQ ID NO: 4653 - DNA, 31 bp, Artificial Sequence
  Description of Artificial Sequence:  Enzymatic Nucleic Acid
gacatgaaggctagctacaacgaatgagatg

SEQ ID NO: 4654 - DNA, 31 bp, Artificial Sequence
  Description of Artificial Sequence:  Enzymatic Nucleic Acid
cagtaggaggctagctacaacgaatgaacat

SEQ ID NO: 4655 - DNA, 31 bp, Artificial Sequence
  Description of Artificial Sequence:  Enzymatic Nucleic Acid
ggcttgaaggctagctacaacgaagtaggac

SEQ ID NO: 4656 - DNA, 31 bp, Artificial Sequence
  Description of Artificial Sequence:  Enzymatic Nucleic Acid
ccaaggcaggctagctacaacgaagcttgga

SEQ ID NO: 4657 - DNA, 31 bp, Artificial Sequence
  Description of Artificial Sequence:  Enzymatic Nucleic Acid
taactccaggctagctacaacgaagaagctc

SEQ ID NO: 4658 - DNA, 31 bp, Artificial Sequence
  Description of Artificial Sequence:  Enzymatic Nucleic Acid
ccccgataggctagctacaacgaagagcaga

SEQ ID NO: 4659 - DNA, 31 bp, Artificial Sequence
  Description of Artificial Sequence:  Enzymatic Nucleic Acid
gaggtgaaggctagctacaacgaaatgttcc

SEQ ID NO: 4660 - DNA, 31 bp, Artificial Sequence
  Description of Artificial Sequence:  Enzymatic Nucleic Acid
ccccaacaggctagctacaacgaagaatagc

SEQ ID NO: 4661 - DNA, 31 bp, Artificial Sequence
  Description of Artificial Sequence:  Enzymatic Nucleic Acid
caccccaaggctagctacaacgaacagaata

SEQ ID NO: 4662 - DNA, 31 bp, Artificial Sequence
  Description of Artificial Sequence:  Enzymatic Nucleic Acid
aacgttgaggctagctacaacgaatagctga

SEQ ID NO: 4663 - DNA, 31 bp, Artificial Sequence
  Description of Artificial Sequence:  Enzymatic Nucleic Acid
tgaaaccaggctagctacaacgaaatagttg

SEQ ID NO: 4664 - DNA, 31 bp, Artificial Sequence
  Description of Artificial Sequence:  Enzymatic Nucleic Acid
aagtaagaggctagctacaacgaaggaaatg

SEQ ID NO: 4665 - DNA, 31 bp, Artificial Sequence
  Description of Artificial Sequence:  Enzymatic Nucleic Acid
ttcaagaaggctagctacaacgaagtttctc

SEQ ID NO: 4666 - DNA, 31 bp, Artificial Sequence
  Description of Artificial Sequence:  Enzymatic Nucleic Acid
ccaaaagaggctagctacaacgaaccaaata

SEQ ID NO: 4667 - DNA, 31 bp, Artificial Sequence
  Description of Artificial Sequence:  Enzymatic Nucleic Acid
cgaatccaggctagctacaacgaactccaaa

SEQ ID NO: 4668 - DNA, 31 bp, Artificial Sequence
  Description of Artificial Sequence:  Enzymatic Nucleic Acid
tctaacaaggctagctacaacgaagtagttt

SEQ ID NO: 4669 - DNA, 31 bp, Artificial Sequence
  Description of Artificial Sequence:  Enzymatic Nucleic Acid
tcgtctaaggctagctacaacgaaacagtag

SEQ ID NO: 4670 - DNA, 31 bp, Artificial Sequence
  Description of Artificial Sequence:  Enzymatic Nucleic Acid
aatactaaggctagctacaacgaattgagat

SEQ ID NO: 4671 - DNA, 31 bp, Artificial Sequence
  Description of Artificial Sequence:  Enzymatic Nucleic Acid
tctatcaaggctagctacaacgaaatgtcct

SEQ ID NO: 4672 - DNA, 31 bp, Artificial Sequence
  Description of Artificial Sequence:  Enzymatic Nucleic Acid
attgcttaggctagctacaacgaatctatca

SEQ ID NO: 4673 - DNA, 31 bp, Artificial Sequence
  Description of Artificial Sequence:  Enzymatic Nucleic Acid
gggccccaggctagctacaacgaaaattgct

SEQ ID NO: 4674 - DNA, 31 bp, Artificial Sequence
  Description of Artificial Sequence:  Enzymatic Nucleic Acid
tttagtaaggctagctacaacgaattgggat

SEQ ID NO: 4675 - DNA, 31 bp, Artificial Sequence
  Description of Artificial Sequence:  Enzymatic Nucleic Acid
attaactaggctagctacaacgaatactctg

SEQ ID NO: 4676 - DNA, 31 bp, Artificial Sequence
  Description of Artificial Sequence:  Enzymatic Nucleic Acid
attggggaggctagctacaacgaagaaagat

SEQ ID NO: 4677 - DNA, 31 bp, Artificial Sequence
  Description of Artificial Sequence:  Enzymatic Nucleic Acid
caccccaaggctagctacaacgaagtccccc

SEQ ID NO: 4678 - DNA, 31 bp, Artificial Sequence
  Description of Artificial Sequence:  Enzymatic Nucleic Acid
tgctggcaggctagctacaacgaagttgtga

SEQ ID NO: 4679 - DNA, 31 bp, Artificial Sequence
  Description of Artificial Sequence:  Enzymatic Nucleic Acid
ggccctgaggctagctacaacgatctgggat

SEQ ID NO: 4680 - DNA, 31 bp, Artificial Sequence
  Description of Artificial Sequence:  Enzymatic Nucleic Acid
gtacagggggctagctacaacgacctgactc

SEQ ID NO: 4681 - DNA, 31 bp, Artificial Sequence
  Description of Artificial Sequence:  Enzymatic Nucleic Acid
tggagccaggctagctacaacgacagcagga

SEQ ID NO: 4682 - DNA, 31 bp, Artificial Sequence
  Description of Artificial Sequence:  Enzymatic Nucleic Acid
aactggagggctagctacaacgacaccagca

SEQ ID NO: 4683 - DNA, 31 bp, Artificial Sequence
  Description of Artificial Sequence:  Enzymatic Nucleic Acid
ttcctgaaggctagctacaacgatggagcca

SEQ ID NO: 4684 - DNA, 31 bp, Artificial Sequence
  Description of Artificial Sequence:  Enzymatic Nucleic Acid
agggctcaggctagctacaacgatgttcctg

SEQ ID NO: 4685 - DNA, 31 bp, Artificial Sequence
  Description of Artificial Sequence:  Enzymatic Nucleic Acid
gagcagggggctagctacaacgatcactgtt

SEQ ID NO: 4686 - DNA, 31 bp, Artificial Sequence
  Description of Artificial Sequence:  Enzymatic Nucleic Acid
aagattgaggctagctacaacgagatatggc

SEQ ID NO: 4687 - DNA, 31 bp, Artificial Sequence
  Description of Artificial Sequence:  Enzymatic Nucleic Acid
ctgtaacaggctagctacaacgagagcaggg

SEQ ID NO: 4688 - DNA, 31 bp, Artificial Sequence
  Description of Artificial Sequence:  Enzymatic Nucleic Acid
aaaccccgggctagctacaacgactgtaaca

SEQ ID NO: 4689 - DNA, 31 bp, Artificial Sequence
  Description of Artificial Sequence:  Enzymatic Nucleic Acid
aagaaaaaggctagctacaacgacccgcctg

SEQ ID NO: 4690 - DNA, 31 bp, Artificial Sequence
  Description of Artificial Sequence:  Enzymatic Nucleic Acid
agtctagaggctagctacaacgatctgtggt

SEQ ID NO: 4691 - DNA, 31 bp, Artificial Sequence
  Description of Artificial Sequence:  Enzymatic Nucleic Acid
gtccaccaggctagctacaacgagagtctag

SEQ ID NO: 4692 - DNA, 31 bp, Artificial Sequence
  Description of Artificial Sequence:  Enzymatic Nucleic Acid
gaagtccaggctagctacaacgacacgagtc

SEQ ID NO: 4693 - DNA, 31 bp, Artificial Sequence
  Description of Artificial Sequence:  Enzymatic Nucleic Acid
aagacacaggctagctacaacgagggtgttc

SEQ ID NO: 4694 - DNA, 31 bp, Artificial Sequence
  Description of Artificial Sequence:  Enzymatic Nucleic Acid
aattttggggctagctacaacgacaagacac

SEQ ID NO: 4695 - DNA, 31 bp, Artificial Sequence
  Description of Artificial Sequence:  Enzymatic Nucleic Acid
atttgggaggctagctacaacgatgcgaatt

SEQ ID NO: 4696 - DNA, 31 bp, Artificial Sequence
  Description of Artificial Sequence:  Enzymatic Nucleic Acid
gtgagtgaggctagctacaacgatggagatt

SEQ ID NO: 4697 - DNA, 31 bp, Artificial Sequence
  Description of Artificial Sequence:  Enzymatic Nucleic Acid
agcgataaggctagctacaacgacaggacaa

SEQ ID NO: 4698 - DNA, 31 bp, Artificial Sequence
  Description of Artificial Sequence:  Enzymatic Nucleic Acid
ataaaacgggctagctacaacgacgcagaca

SEQ ID NO: 4699 - DNA, 31 bp, Artificial Sequence
  Description of Artificial Sequence:  Enzymatic Nucleic Acid
tgataaaaggctagctacaacgagccgcaga

SEQ ID NO: 4700 - DNA, 31 bp, Artificial Sequence
  Description of Artificial Sequence:  Enzymatic Nucleic Acid
cagaagaaggctagctacaacgacaacaaga

SEQ ID NO: 4701 - DNA, 31 bp, Artificial Sequence
  Description of Artificial Sequence:  Enzymatic Nucleic Acid
gcaacataggctagctacaacgacttgatag

SEQ ID NO: 4702 - DNA, 31 bp, Artificial Sequence
  Description of Artificial Sequence:  Enzymatic Nucleic Acid
aggacaaaggctagctacaacgagggcaaca

SEQ ID NO: 4703 - DNA, 31 bp, Artificial Sequence
  Description of Artificial Sequence:  Enzymatic Nucleic Acid
gtccggtgggctagctacaacgatggttgtt

SEQ ID NO: 4704 - DNA, 31 bp, Artificial Sequence
  Description of Artificial Sequence:  Enzymatic Nucleic Acid
tgcgaaagggctagctacaacgaccaagatg

SEQ ID NO: 4705 - DNA, 31 bp, Artificial Sequence
  Description of Artificial Sequence:  Enzymatic Nucleic Acid
gaggcccaggctagctacaacgatcccatag

SEQ ID NO: 4706 - DNA, 31 bp, Artificial Sequence
  Description of Artificial Sequence:  Enzymatic Nucleic Acid
gactgaggggctagctacaacgaccactccc

SEQ ID NO: 4707 - DNA, 31 bp, Artificial Sequence
  Description of Artificial Sequence:  Enzymatic Nucleic Acid
gaaacggaggctagctacaacgatgaggccc

SEQ ID NO: 4708 - DNA, 31 bp, Artificial Sequence
  Description of Artificial Sequence:  Enzymatic Nucleic Acid
aagagaaaggctagctacaacgaggactgag

SEQ ID NO: 4709 - DNA, 31 bp, Artificial Sequence
  Description of Artificial Sequence:  Enzymatic Nucleic Acid
aaactgagggctagctacaacgacaagagaa

SEQ ID NO: 4710 - DNA, 31 bp, Artificial Sequence
  Description of Artificial Sequence:  Enzymatic Nucleic Acid
ctagtaaaggctagctacaacgatgagccaa

SEQ ID NO: 4711 - DNA, 31 bp, Artificial Sequence
  Description of Artificial Sequence:  Enzymatic Nucleic Acid
aaatggcaggctagctacaacgatagtaaac

SEQ ID NO: 4712 - DNA, 31 bp, Artificial Sequence
  Description of Artificial Sequence:  Enzymatic Nucleic Acid
acgaaccaggctagctacaacgatgaacaaa

SEQ ID NO: 4713 - DNA, 31 bp, Artificial Sequence
  Description of Artificial Sequence:  Enzymatic Nucleic Acid
cctacgaaggctagctacaacgacactgaac

SEQ ID NO: 4714 - DNA, 31 bp, Artificial Sequence
  Description of Artificial Sequence:  Enzymatic Nucleic Acid
aagccctaggctagctacaacgagaaccact

SEQ ID NO: 4715 - DNA, 31 bp, Artificial Sequence
  Description of Artificial Sequence:  Enzymatic Nucleic Acid
ggggaaagggctagctacaacgacctacgaa

SEQ ID NO: 4716 - DNA, 31 bp, Artificial Sequence
  Description of Artificial Sequence:  Enzymatic Nucleic Acid
actgaaagggctagctacaacgacagacagt

SEQ ID NO: 4717 - DNA, 31 bp, Artificial Sequence
  Description of Artificial Sequence:  Enzymatic Nucleic Acid
ccatataaggctagctacaacgatgaaagcc

SEQ ID NO: 4718 - DNA, 31 bp, Artificial Sequence
  Description of Artificial Sequence:  Enzymatic Nucleic Acid
ccccaaaaggctagctacaacgacacatcat

SEQ ID NO: 4719 - DNA, 31 bp, Artificial Sequence
  Description of Artificial Sequence:  Enzymatic Nucleic Acid
agacttggggctagctacaacgaccccaaaa

SEQ ID NO: 4720 - DNA, 31 bp, Artificial Sequence
  Description of Artificial Sequence:  Enzymatic Nucleic Acid
tgtacagaggctagctacaacgattggcccc

SEQ ID NO: 4721 - DNA, 31 bp, Artificial Sequence
  Description of Artificial Sequence:  Enzymatic Nucleic Acid
taaagggaggctagctacaacgatcaagatg

SEQ ID NO: 4722 - DNA, 31 bp, Artificial Sequence
  Description of Artificial Sequence:  Enzymatic Nucleic Acid
aatgtataggctagctacaacgaccaaagac

SEQ ID NO: 4723 - DNA, 31 bp, Artificial Sequence
  Description of Artificial Sequence:  Enzymatic Nucleic Acid
tgccccaaggctagctacaacgatcccaatt

SEQ ID NO: 4724 - DNA, 31 bp, Artificial Sequence
  Description of Artificial Sequence:  Enzymatic Nucleic Acid
gcaatgtgggctagctacaacgacccaactc

SEQ ID NO: 4725 - DNA, 31 bp, Artificial Sequence
  Description of Artificial Sequence:  Enzymatic Nucleic Acid
tcaataggggctagctacaacgactgtttac

SEQ ID NO: 4726 - DNA, 31 bp, Artificial Sequence
  Description of Artificial Sequence:  Enzymatic Nucleic Acid
ttgacataggctagctacaacgatttccaat

SEQ ID NO: 4727 - DNA, 31 bp, Artificial Sequence
  Description of Artificial Sequence:  Enzymatic Nucleic Acid
ccaaaagaggctagctacaacgaccacaatt

SEQ ID NO: 4728 - DNA, 31 bp, Artificial Sequence
  Description of Artificial Sequence:  Enzymatic Nucleic Acid
gcggcaaaggctagctacaacgacccaaaag

SEQ ID NO: 4729 - DNA, 31 bp, Artificial Sequence
  Description of Artificial Sequence:  Enzymatic Nucleic Acid
ctgttttgggctagctacaacgattgtatgc

SEQ ID NO: 4730 - DNA, 31 bp, Artificial Sequence
  Description of Artificial Sequence:  Enzymatic Nucleic Acid
agtaaaagggctagctacaacgactgttttg

SEQ ID NO: 4731 - DNA, 31 bp, Artificial Sequence
  Description of Artificial Sequence:  Enzymatic Nucleic Acid
tagaaaggggctagctacaacgacttgtaag

SEQ ID NO: 4732 - DNA, 31 bp, Artificial Sequence
  Description of Artificial Sequence:  Enzymatic Nucleic Acid
actgtttaggctagctacaacgattagaaag

SEQ ID NO: 4733 - DNA, 31 bp, Artificial Sequence
  Description of Artificial Sequence:  Enzymatic Nucleic Acid
ttcacataggctagctacaacgatgtttact

SEQ ID NO: 4734 - DNA, 31 bp, Artificial Sequence
  Description of Artificial Sequence:  Enzymatic Nucleic Acid
ccgagcaaggctagctacaacgaggggtaaa

SEQ ID NO: 4735 - DNA, 31 bp, Artificial Sequence
  Description of Artificial Sequence:  Enzymatic Nucleic Acid
ggccgttgggctagctacaacgacgagcaac

SEQ ID NO: 4736 - DNA, 31 bp, Artificial Sequence
  Description of Artificial Sequence:  Enzymatic Nucleic Acid
agaccaggggctagctacaacgacgttgccg

SEQ ID NO: 4737 - DNA, 31 bp, Artificial Sequence
  Description of Artificial Sequence:  Enzymatic Nucleic Acid
ggcatagaggctagctacaacgacaggccgt

SEQ ID NO: 4738 - DNA, 31 bp, Artificial Sequence
  Description of Artificial Sequence:  Enzymatic Nucleic Acid
agcaaacaggctagctacaacgattggcata

SEQ ID NO: 4739 - DNA, 31 bp, Artificial Sequence
  Description of Artificial Sequence:  Enzymatic Nucleic Acid
agccccaaggctagctacaacgacagtgggg

SEQ ID NO: 4740 - DNA, 31 bp, Artificial Sequence
  Description of Artificial Sequence:  Enzymatic Nucleic Acid
tggccaagggctagctacaacgacccaacca

SEQ ID NO: 4741 - DNA, 31 bp, Artificial Sequence
  Description of Artificial Sequence:  Enzymatic Nucleic Acid
gcctatggggctagctacaacgacaagcccc

SEQ ID NO: 4742 - DNA, 31 bp, Artificial Sequence
  Description of Artificial Sequence:  Enzymatic Nucleic Acid
gctgatggggctagctacaacgactatggcc

SEQ ID NO: 4743 - DNA, 31 bp, Artificial Sequence
  Description of Artificial Sequence:  Enzymatic Nucleic Acid
cgcatgcgggctagctacaacgatgatggcc

SEQ ID NO: 4744 - DNA, 31 bp, Artificial Sequence
  Description of Artificial Sequence:  Enzymatic Nucleic Acid
aggttccaggctagctacaacgagcatgcgc

SEQ ID NO: 4745 - DNA, 31 bp, Artificial Sequence
  Description of Artificial Sequence:  Enzymatic Nucleic Acid
acaagcggggctagctacaacgataggagtt

SEQ ID NO: 4746 - DNA, 31 bp, Artificial Sequence
  Description of Artificial Sequence:  Enzymatic Nucleic Acid
cagacctgggctagctacaacgatgcgagca

SEQ ID NO: 4747 - DNA, 31 bp, Artificial Sequence
  Description of Artificial Sequence:  Enzymatic Nucleic Acid
gccccagaggctagctacaacgactgctgcg

SEQ ID NO: 4748 - DNA, 31 bp, Artificial Sequence
  Description of Artificial Sequence:  Enzymatic Nucleic Acid
gagttttgggctagctacaacgacccagacc

SEQ ID NO: 4749 - DNA, 31 bp, Artificial Sequence
  Description of Artificial Sequence:  Enzymatic Nucleic Acid
ggagagcaggctagctacaacgagacagaat

SEQ ID NO: 4750 - DNA, 31 bp, Artificial Sequence
  Description of Artificial Sequence:  Enzymatic Nucleic Acid
cctagcagggctagctacaacgacatggaaa

SEQ ID NO: 4751 - DNA, 31 bp, Artificial Sequence
  Description of Artificial Sequence:  Enzymatic Nucleic Acid
cagcacagggctagctacaacgactagcagc

SEQ ID NO: 4752 - DNA, 31 bp, Artificial Sequence
  Description of Artificial Sequence:  Enzymatic Nucleic Acid
acaaaggaggctagctacaacgagtcccgcg

SEQ ID NO: 4753 - DNA, 31 bp, Artificial Sequence
  Description of Artificial Sequence:  Enzymatic Nucleic Acid
cgacgggaggctagctacaacgagtaaacaa

SEQ ID NO: 4754 - DNA, 31 bp, Artificial Sequence
  Description of Artificial Sequence:  Enzymatic Nucleic Acid
agcgccgaggctagctacaacgagggacgta

SEQ ID NO: 4755 - DNA, 31 bp, Artificial Sequence
  Description of Artificial Sequence:  Enzymatic Nucleic Acid
attcagcgggctagctacaacgacgacggga

SEQ ID NO: 4756 - DNA, 31 bp, Artificial Sequence
  Description of Artificial Sequence:  Enzymatic Nucleic Acid
ccaagcggggctagctacaacgacccgggag

SEQ ID NO: 4757 - DNA, 31 bp, Artificial Sequence
  Description of Artificial Sequence:  Enzymatic Nucleic Acid
cggtagagggctagctacaacgacccaagcg

SEQ ID NO: 4758 - DNA, 31 bp, Artificial Sequence
  Description of Artificial Sequence:  Enzymatic Nucleic Acid
cccgtggaggctagctacaacgaggtcggta

SEQ ID NO: 4759 - DNA, 31 bp, Artificial Sequence
  Description of Artificial Sequence:  Enzymatic Nucleic Acid
gaggtgcgggctagctacaacgacccgtgga

SEQ ID NO: 4760 - DNA, 31 bp, Artificial Sequence
  Description of Artificial Sequence:  Enzymatic Nucleic Acid
ggcacagaggctagctacaacgaggggagtc

SEQ ID NO: 4761 - DNA, 31 bp, Artificial Sequence
  Description of Artificial Sequence:  Enzymatic Nucleic Acid
agtgcacaggctagctacaacgaggtccggc

SEQ ID NO: 4762 - DNA, 31 bp, Artificial Sequence
  Description of Artificial Sequence:  Enzymatic Nucleic Acid
ccatgcgaggctagctacaacgagtgcagag

SEQ ID NO: 4763 - DNA, 31 bp, Artificial Sequence
  Description of Artificial Sequence:  Enzymatic Nucleic Acid
ggcgttcaggctagctacaacgaggtggtct

SEQ ID NO: 4764 - DNA, 31 bp, Artificial Sequence
  Description of Artificial Sequence:  Enzymatic Nucleic Acid
atgcaagaggctagctacaacgacttgggca

SEQ ID NO: 4765 - DNA, 31 bp, Artificial Sequence
  Description of Artificial Sequence:  Enzymatic Nucleic Acid
tgacattgggctagctacaacgatgaaagtc

SEQ ID NO: 4766 - DNA, 31 bp, Artificial Sequence
  Description of Artificial Sequence:  Enzymatic Nucleic Acid
gaagtatgggctagctacaacgactcaaggt

SEQ ID NO: 4767 - DNA, 31 bp, Artificial Sequence
  Description of Artificial Sequence:  Enzymatic Nucleic Acid
tcctcccaggctagctacaacgatcattaaa

SEQ ID NO: 4768 - DNA, 31 bp, Artificial Sequence
  Description of Artificial Sequence:  Enzymatic Nucleic Acid
tcccccaaggctagctacaacgatcctccca

SEQ ID NO: 4769 - DNA, 31 bp, Artificial Sequence
  Description of Artificial Sequence:  Enzymatic Nucleic Acid
taacctaaggctagctacaacgactcctccc

SEQ ID NO: 4770 - DNA, 31 bp, Artificial Sequence
  Description of Artificial Sequence:  Enzymatic Nucleic Acid
acctttaaggctagctacaacgactaacctc

SEQ ID NO: 4771 - DNA, 31 bp, Artificial Sequence
  Description of Artificial Sequence:  Enzymatic Nucleic Acid
tacaaagaggctagctacaacgactttaacc

SEQ ID NO: 4772 - DNA, 31 bp, Artificial Sequence
  Description of Artificial Sequence:  Enzymatic Nucleic Acid
gcctacagggctagctacaacgactcctagt

SEQ ID NO: 4773 - DNA, 31 bp, Artificial Sequence
  Description of Artificial Sequence:  Enzymatic Nucleic Acid
aatttatgggctagctacaacgactacagcc

SEQ ID NO: 4774 - DNA, 31 bp, Artificial Sequence
  Description of Artificial Sequence:  Enzymatic Nucleic Acid
tgaacacaggctagctacaacgacaatttat

SEQ ID NO: 4775 - DNA, 31 bp, Artificial Sequence
  Description of Artificial Sequence:  Enzymatic Nucleic Acid
gcatggtgggctagctacaacgatggtgaac

SEQ ID NO: 4776 - DNA, 31 bp, Artificial Sequence
  Description of Artificial Sequence:  Enzymatic Nucleic Acid
cttggaggggctagctacaacgattgaacag

SEQ ID NO: 4777 - DNA, 31 bp, Artificial Sequence
  Description of Artificial Sequence:  Enzymatic Nucleic Acid
aggcacagggctagctacaacgattggaggc

SEQ ID NO: 4778 - DNA, 31 bp, Artificial Sequence
  Description of Artificial Sequence:  Enzymatic Nucleic Acid
caaagccaggctagctacaacgaccaaggca

SEQ ID NO: 4779 - DNA, 31 bp, Artificial Sequence
  Description of Artificial Sequence:  Enzymatic Nucleic Acid
ccccaaagggctagctacaacgacacccaag

SEQ ID NO: 4780 - DNA, 31 bp, Artificial Sequence
  Description of Artificial Sequence:  Enzymatic Nucleic Acid
tgtccatgggctagctacaacgacccaaagc

SEQ ID NO: 4781 - DNA, 31 bp, Artificial Sequence
  Description of Artificial Sequence:  Enzymatic Nucleic Acid
tctttataggctagctacaacgagggtcaat

SEQ ID NO: 4782 - DNA, 31 bp, Artificial Sequence
  Description of Artificial Sequence:  Enzymatic Nucleic Acid
cacagaagggctagctacaacgatccaaatt

SEQ ID NO: 4783 - DNA, 31 bp, Artificial Sequence
  Description of Artificial Sequence:  Enzymatic Nucleic Acid
gagagtaaggctagctacaacgatccacaga

SEQ ID NO: 4784 - DNA, 31 bp, Artificial Sequence
  Description of Artificial Sequence:  Enzymatic Nucleic Acid
ctctaaggggctagctacaacgacccccgat

SEQ ID NO: 4785 - DNA, 31 bp, Artificial Sequence
  Description of Artificial Sequence:  Enzymatic Nucleic Acid
tccggagaggctagctacaacgatctaaggc

SEQ ID NO: 4786 - DNA, 31 bp, Artificial Sequence
  Description of Artificial Sequence:  Enzymatic Nucleic Acid
cctgagtgggctagctacaacgacgtatggt

SEQ ID NO: 4787 - DNA, 31 bp, Artificial Sequence
  Description of Artificial Sequence:  Enzymatic Nucleic Acid
atagcttgggctagctacaacgactgagtgc

SEQ ID NO: 4788 - DNA, 31 bp, Artificial Sequence
  Description of Artificial Sequence:  Enzymatic Nucleic Acid
cagaatagggctagctacaacgattgcctga

SEQ ID NO: 4789 - DNA, 31 bp, Artificial Sequence
  Description of Artificial Sequence:  Enzymatic Nucleic Acid
tcaactcaggctagctacaacgacccaacac

SEQ ID NO: 4790 - DNA, 31 bp, Artificial Sequence
  Description of Artificial Sequence:  Enzymatic Nucleic Acid
ttcatcaaggctagctacaacgatcacccca

SEQ ID NO: 4791 - DNA, 31 bp, Artificial Sequence
  Description of Artificial Sequence:  Enzymatic Nucleic Acid
ccaggtggggctagctacaacgatagattca

SEQ ID NO: 4792 - DNA, 31 bp, Artificial Sequence
  Description of Artificial Sequence:  Enzymatic Nucleic Acid
acttcccaggctagctacaacgaccaggtgg

SEQ ID NO: 4793 - DNA, 31 bp, Artificial Sequence
  Description of Artificial Sequence:  Enzymatic Nucleic Acid
ccaaattaggctagctacaacgattcccacc

SEQ ID NO: 4794 - DNA, 31 bp, Artificial Sequence
  Description of Artificial Sequence:  Enzymatic Nucleic Acid
cctggatgggctagctacaacgatggatctt

SEQ ID NO: 4795 - DNA, 31 bp, Artificial Sequence
  Description of Artificial Sequence:  Enzymatic Nucleic Acid
gctgactaggctagctacaacgataattccc

SEQ ID NO: 4796 - DNA, 31 bp, Artificial Sequence
  Description of Artificial Sequence:  Enzymatic Nucleic Acid
atagctgaggctagctacaacgatactaatt

SEQ ID NO: 4797 - DNA, 31 bp, Artificial Sequence
  Description of Artificial Sequence:  Enzymatic Nucleic Acid
tgacatagggctagctacaacgatgactact

SEQ ID NO: 4798 - DNA, 31 bp, Artificial Sequence
  Description of Artificial Sequence:  Enzymatic Nucleic Acid
catattaaggctagctacaacgagttgacat

SEQ ID NO: 4799 - DNA, 31 bp, Artificial Sequence
  Description of Artificial Sequence:  Enzymatic Nucleic Acid
tttttaggggctagctacaacgaccatatta

SEQ ID NO: 4800 - DNA, 31 bp, Artificial Sequence
  Description of Artificial Sequence:  Enzymatic Nucleic Acid
atgtgaaaggctagctacaacgacacaatag

SEQ ID NO: 4801 - DNA, 31 bp, Artificial Sequence
  Description of Artificial Sequence:  Enzymatic Nucleic Acid
gtttctcgggctagctacaacgaccaaaagt

SEQ ID NO: 4802 - DNA, 31 bp, Artificial Sequence
  Description of Artificial Sequence:  Enzymatic Nucleic Acid
aaaagacaggctagctacaacgacaaatatt

SEQ ID NO: 4803 - DNA, 31 bp, Artificial Sequence
  Description of Artificial Sequence:  Enzymatic Nucleic Acid
aatccacaggctagctacaacgatccaaaag

SEQ ID NO: 4804 - DNA, 31 bp, Artificial Sequence
  Description of Artificial Sequence:  Enzymatic Nucleic Acid
gggacctgggctagctacaacgactcttcgt

SEQ ID NO: 4805 - DNA, 31 bp, Artificial Sequence
  Description of Artificial Sequence:  Enzymatic Nucleic Acid
ctaggggaggctagctacaacgactgcctct

SEQ ID NO: 4806 - DNA, 31 bp, Artificial Sequence
  Description of Artificial Sequence:  Enzymatic Nucleic Acid
gattgagaggctagctacaacgacttcgtct

SEQ ID NO: 4807 - DNA, 31 bp, Artificial Sequence
  Description of Artificial Sequence:  Enzymatic Nucleic Acid
ttctgcgaggctagctacaacgagcggcgat

SEQ ID NO: 4808 - DNA, 31 bp, Artificial Sequence
  Description of Artificial Sequence:  Enzymatic Nucleic Acid
aaggaataggctagctacaacgataacattg

SEQ ID NO: 4809 - DNA, 31 bp, Artificial Sequence
  Description of Artificial Sequence:  Enzymatic Nucleic Acid
gtttcccaggctagctacaacgacttatgtg

SEQ ID NO: 4810 - DNA, 31 bp, Artificial Sequence
  Description of Artificial Sequence:  Enzymatic Nucleic Acid
gaataaagggctagctacaacgacccgtaaa

SEQ ID NO: 4811 - DNA, 31 bp, Artificial Sequence
  Description of Artificial Sequence:  Enzymatic Nucleic Acid
gcaaggtaggctagctacaacgacgtagaag

SEQ ID NO: 4812 - DNA, 31 bp, Artificial Sequence
  Description of Artificial Sequence:  Enzymatic Nucleic Acid
ggagtttgggctagctacaacgacatttagg

SEQ ID NO: 4813 - DNA, 31 bp, Artificial Sequence
  Description of Artificial Sequence:  Enzymatic Nucleic Acid
acaaattgggctagctacaacgattacatct

SEQ ID NO: 4814 - DNA, 31 bp, Artificial Sequence
  Description of Artificial Sequence:  Enzymatic Nucleic Acid
gtaaggggggctagctacaacgacccacaaa

SEQ ID NO: 4815 - DNA, 31 bp, Artificial Sequence
  Description of Artificial Sequence:  Enzymatic Nucleic Acid
ttcatttaggctagctacaacgatgtaaggg

SEQ ID NO: 4816 - DNA, 31 bp, Artificial Sequence
  Description of Artificial Sequence:  Enzymatic Nucleic Acid
ggataaaaggctagctacaacgactagcagg

SEQ ID NO: 4817 - DNA, 31 bp, Artificial Sequence
  Description of Artificial Sequence:  Enzymatic Nucleic Acid
ggataataggctagctacaacgaggtttgat

SEQ ID NO: 4818 - DNA, 31 bp, Artificial Sequence
  Description of Artificial Sequence:  Enzymatic Nucleic Acid
actacataggctagctacaacgatctggata

SEQ ID NO: 4819 - DNA, 31 bp, Artificial Sequence
  Description of Artificial Sequence:  Enzymatic Nucleic Acid
atgattaaggctagctacaacgatacatact

SEQ ID NO: 4820 - DNA, 31 bp, Artificial Sequence
  Description of Artificial Sequence:  Enzymatic Nucleic Acid
gatccccgggctagctacaacgacttccaaa

SEQ ID NO: 4821 - DNA, 31 bp, Artificial Sequence
  Description of Artificial Sequence:  Enzymatic Nucleic Acid
cgtgtggaggctagctacaacgatctctttt

SEQ ID NO: 4822 - DNA, 31 bp, Artificial Sequence
  Description of Artificial Sequence:  Enzymatic Nucleic Acid
aggcgctaggctagctacaacgagtgtggac

SEQ ID NO: 4823 - DNA, 31 bp, Artificial Sequence
  Description of Artificial Sequence:  Enzymatic Nucleic Acid
atgaggcgggctagctacaacgatacgtgtg

SEQ ID NO: 4824 - DNA, 31 bp, Artificial Sequence
  Description of Artificial Sequence:  Enzymatic Nucleic Acid
tatggtgaggctagctacaacgaccgcaaaa

SEQ ID NO: 4825 - DNA, 31 bp, Artificial Sequence
  Description of Artificial Sequence:  Enzymatic Nucleic Acid
ctcccatgggctagctacaacgatgtagatc

SEQ ID NO: 4826 - DNA, 31 bp, Artificial Sequence
  Description of Artificial Sequence:  Enzymatic Nucleic Acid
aagaccaaggctagctacaacgactcccatg

SEQ ID NO: 4827 - DNA, 31 bp, Artificial Sequence
  Description of Artificial Sequence:  Enzymatic Nucleic Acid
ttggaagaggctagctacaacgacaacctcc

SEQ ID NO: 4828 - DNA, 31 bp, Artificial Sequence
  Description of Artificial Sequence:  Enzymatic Nucleic Acid
tccccatgggctagctacaacgacttttcga

SEQ ID NO: 4829 - DNA, 31 bp, Artificial Sequence
  Description of Artificial Sequence:  Enzymatic Nucleic Acid
gggtccaaggctagctacaacgatgatgatc

SEQ ID NO: 4830 - DNA, 31 bp, Artificial Sequence
  Description of Artificial Sequence:  Enzymatic Nucleic Acid
tgagttggggctagctacaacgatttgaatg

SEQ ID NO: 4831 - DNA, 31 bp, Artificial Sequence
  Description of Artificial Sequence:  Enzymatic Nucleic Acid
tggatttaggctagctacaacgatgagttgg

SEQ ID NO: 4832 - DNA, 31 bp, Artificial Sequence
  Description of Artificial Sequence:  Enzymatic Nucleic Acid
gcgtccggggctagctacaacgacagttgtc

SEQ ID NO: 4833 - DNA, 31 bp, Artificial Sequence
  Description of Artificial Sequence:  Enzymatic Nucleic Acid
cactcccaggctagctacaacgacttgttgg

SEQ ID NO: 4834 - DNA, 31 bp, Artificial Sequence
  Description of Artificial Sequence:  Enzymatic Nucleic Acid
tgctcccaggctagctacaacgatcccacct

SEQ ID NO: 4835 - DNA, 31 bp, Artificial Sequence
  Description of Artificial Sequence:  Enzymatic Nucleic Acid
cccgaatgggctagctacaacgatcccactc

SEQ ID NO: 4836 - DNA, 31 bp, Artificial Sequence
  Description of Artificial Sequence:  Enzymatic Nucleic Acid
aaccctggggctagctacaacgaccgaatgc

SEQ ID NO: 4837 - DNA, 31 bp, Artificial Sequence
  Description of Artificial Sequence:  Enzymatic Nucleic Acid
ggggtgaaggctagctacaacgacctggccc

SEQ ID NO: 4838 - DNA, 31 bp, Artificial Sequence
  Description of Artificial Sequence:  Enzymatic Nucleic Acid
gggctccaggctagctacaacgacccaacag

SEQ ID NO: 4839 - DNA, 31 bp, Artificial Sequence
  Description of Artificial Sequence:  Enzymatic Nucleic Acid
cgtgagggggctagctacaacgatccacccc

SEQ ID NO: 4840 - DNA, 31 bp, Artificial Sequence
  Description of Artificial Sequence:  Enzymatic Nucleic Acid
tgagtaggggctagctacaacgacctgagcg

SEQ ID NO: 4841 - DNA, 31 bp, Artificial Sequence
  Description of Artificial Sequence:  Enzymatic Nucleic Acid
aggagctgggctagctacaacgatggcacag

SEQ ID NO: 4842 - DNA, 31 bp, Artificial Sequence
  Description of Artificial Sequence:  Enzymatic Nucleic Acid
aggaggagggctagctacaacgatgctggca

SEQ ID NO: 4843 - DNA, 31 bp, Artificial Sequence
  Description of Artificial Sequence:  Enzymatic Nucleic Acid
cctgactgggctagctacaacgacgattggt

SEQ ID NO: 4844 - DNA, 31 bp, Artificial Sequence
  Description of Artificial Sequence:  Enzymatic Nucleic Acid
cttcctgaggctagctacaacgatgccgatt

SEQ ID NO: 4845 - DNA, 31 bp, Artificial Sequence
  Description of Artificial Sequence:  Enzymatic Nucleic Acid
gtaggctgggctagctacaacgacttcctga

SEQ ID NO: 4846 - DNA, 31 bp, Artificial Sequence
  Description of Artificial Sequence:  Enzymatic Nucleic Acid
ggagtaggggctagctacaacgatgccttcc

SEQ ID NO: 4847 - DNA, 31 bp, Artificial Sequence
  Description of Artificial Sequence:  Enzymatic Nucleic Acid
ctgcatggggctagctacaacgactgaggat

SEQ ID NO: 4848 - DNA, 31 bp, Artificial Sequence
  Description of Artificial Sequence:  Enzymatic Nucleic Acid
gtggaaagggctagctacaacgaggtggagt

SEQ ID NO: 4849 - DNA, 31 bp, Artificial Sequence
  Description of Artificial Sequence:  Enzymatic Nucleic Acid
gagtttggggctagctacaacgaggaaagtg

SEQ ID NO: 4850 - DNA, 31 bp, Artificial Sequence
  Description of Artificial Sequence:  Enzymatic Nucleic Acid
ttgaagagggctagctacaacgattggtgga

SEQ ID NO: 4851 - DNA, 31 bp, Artificial Sequence
  Description of Artificial Sequence:  Enzymatic Nucleic Acid
ctctgggaggctagctacaacgacttgaaga

SEQ ID NO: 4852 - DNA, 31 bp, Artificial Sequence
  Description of Artificial Sequence:  Enzymatic Nucleic Acid
caggaaagggctagctacaacgaacagggcc

SEQ ID NO: 4853 - DNA, 31 bp, Artificial Sequence
  Description of Artificial Sequence:  Enzymatic Nucleic Acid
gctcactgggctagctacaacgatcctgaac

SEQ ID NO: 4854 - DNA, 31 bp, Artificial Sequence
  Description of Artificial Sequence:  Enzymatic Nucleic Acid
agacagtaggctagctacaacgatctgagca

SEQ ID NO: 4855 - DNA, 31 bp, Artificial Sequence
  Description of Artificial Sequence:  Enzymatic Nucleic Acid
agagacagggctagctacaacgaattctgag

SEQ ID NO: 4856 - DNA, 31 bp, Artificial Sequence
  Description of Artificial Sequence:  Enzymatic Nucleic Acid
tgacgataggctagctacaacgaggcagaga

SEQ ID NO: 4857 - DNA, 31 bp, Artificial Sequence
  Description of Artificial Sequence:  Enzymatic Nucleic Acid
attgacgaggctagctacaacgaatggcaga

SEQ ID NO: 4858 - DNA, 31 bp, Artificial Sequence
  Description of Artificial Sequence:  Enzymatic Nucleic Acid
cgataagaggctagctacaacgatgacgata

SEQ ID NO: 4859 - DNA, 31 bp, Artificial Sequence
  Description of Artificial Sequence:  Enzymatic Nucleic Acid
gtcttcgaggctagctacaacgaaagattga

SEQ ID NO: 4860 - DNA, 31 bp, Artificial Sequence
  Description of Artificial Sequence:  Enzymatic Nucleic Acid
gtccccagggctagctacaacgacttcgata

SEQ ID NO: 4861 - DNA, 31 bp, Artificial Sequence
  Description of Artificial Sequence:  Enzymatic Nucleic Acid
gtacagggggctagctacaacgaccccagtc

SEQ ID NO: 4862 - DNA, 31 bp, Artificial Sequence
  Description of Artificial Sequence:  Enzymatic Nucleic Acid
atgttcggggctagctacaacgaacagggtc

SEQ ID NO: 4863 - DNA, 31 bp, Artificial Sequence
  Description of Artificial Sequence:  Enzymatic Nucleic Acid
tctccatgggctagctacaacgatcggtaca

SEQ ID NO: 4864 - DNA, 31 bp, Artificial Sequence
  Description of Artificial Sequence:  Enzymatic Nucleic Acid
gttctccaggctagctacaacgagttcggta

SEQ ID NO: 4865 - DNA, 31 bp, Artificial Sequence
  Description of Artificial Sequence:  Enzymatic Nucleic Acid
atgcgatgggctagctacaacgatctccatg

SEQ ID NO: 4866 - DNA, 31 bp, Artificial Sequence
  Description of Artificial Sequence:  Enzymatic Nucleic Acid
tgatgcgaggctagctacaacgagttctcca

SEQ ID NO: 4867 - DNA, 31 bp, Artificial Sequence
  Description of Artificial Sequence:  Enzymatic Nucleic Acid
agtcctgaggctagctacaacgagcgatgtt

SEQ ID NO: 4868 - DNA, 31 bp, Artificial Sequence
  Description of Artificial Sequence:  Enzymatic Nucleic Acid
cctaggagggctagctacaacgacctgatgc

SEQ ID NO: 4869 - DNA, 31 bp, Artificial Sequence
  Description of Artificial Sequence:  Enzymatic Nucleic Acid
agcaggggggctagctacaacgacctaggag

SEQ ID NO: 4870 - DNA, 31 bp, Artificial Sequence
  Description of Artificial Sequence:  Enzymatic Nucleic Acid
cccgcctgggctagctacaacgaaacacgag

SEQ ID NO: 4871 - DNA, 31 bp, Artificial Sequence
  Description of Artificial Sequence:  Enzymatic Nucleic Acid
gatttttgggctagctacaacgacaacaaga

SEQ ID NO: 4872 - DNA, 31 bp, Artificial Sequence
  Description of Artificial Sequence:  Enzymatic Nucleic Acid
tgtgaggaggctagctacaacgattttgtca

SEQ ID NO: 4873 - DNA, 31 bp, Artificial Sequence
  Description of Artificial Sequence:  Enzymatic Nucleic Acid
tggtattgggctagctacaacgagaggattt

SEQ ID NO: 4874 - DNA, 31 bp, Artificial Sequence
  Description of Artificial Sequence:  Enzymatic Nucleic Acid
ctgtggtaggctagctacaacgatgtgagga

SEQ ID NO: 4875 - DNA, 31 bp, Artificial Sequence
  Description of Artificial Sequence:  Enzymatic Nucleic Acid
ctctgtggggctagctacaacgaattgtgag

SEQ ID NO: 4876 - DNA, 31 bp, Artificial Sequence
  Description of Artificial Sequence:  Enzymatic Nucleic Acid
agactctgggctagctacaacgaggtattgt

SEQ ID NO: 4877 - DNA, 31 bp, Artificial Sequence
  Description of Artificial Sequence:  Enzymatic Nucleic Acid
accacgagggctagctacaacgactagactc

SEQ ID NO: 4878 - DNA, 31 bp, Artificial Sequence
  Description of Artificial Sequence:  Enzymatic Nucleic Acid
gagagaagggctagctacaacgaccaccacg

SEQ ID NO: 4879 - DNA, 31 bp, Artificial Sequence
  Description of Artificial Sequence:  Enzymatic Nucleic Acid
ctagaaaaggctagctacaacgatgagagaa

SEQ ID NO: 4880 - DNA, 31 bp, Artificial Sequence
  Description of Artificial Sequence:  Enzymatic Nucleic Acid
cacgggtgggctagctacaacgatcccccta

SEQ ID NO: 4881 - DNA, 31 bp, Artificial Sequence
  Description of Artificial Sequence:  Enzymatic Nucleic Acid
cacacgggggctagctacaacgagttccccc

SEQ ID NO: 4882 - DNA, 31 bp, Artificial Sequence
  Description of Artificial Sequence:  Enzymatic Nucleic Acid
actgcgaaggctagctacaacgatttggcca

SEQ ID NO: 4883 - DNA, 31 bp, Artificial Sequence
  Description of Artificial Sequence:  Enzymatic Nucleic Acid
actggagaggctagctacaacgattgggact

SEQ ID NO: 4884 - DNA, 31 bp, Artificial Sequence
  Description of Artificial Sequence:  Enzymatic Nucleic Acid
ttggtgagggctagctacaacgagactggag

SEQ ID NO: 4885 - DNA, 31 bp, Artificial Sequence
  Description of Artificial Sequence:  Enzymatic Nucleic Acid
caggttggggctagctacaacgagagtgact

SEQ ID NO: 4886 - DNA, 31 bp, Artificial Sequence
  Description of Artificial Sequence:  Enzymatic Nucleic Acid
acaacaggggctagctacaacgatggtgagt

SEQ ID NO: 4887 - DNA, 31 bp, Artificial Sequence
  Description of Artificial Sequence:  Enzymatic Nucleic Acid
aggacaaaggctagctacaacgatggaggac

SEQ ID NO: 4888 - DNA, 31 bp, Artificial Sequence
  Description of Artificial Sequence:  Enzymatic Nucleic Acid
tccagcgaggctagctacaacgaaaccagga

SEQ ID NO: 4889 - DNA, 31 bp, Artificial Sequence
  Description of Artificial Sequence:  Enzymatic Nucleic Acid
cagacacaggctagctacaacgaccagcgat

SEQ ID NO: 4890 - DNA, 31 bp, Artificial Sequence
  Description of Artificial Sequence:  Enzymatic Nucleic Acid
gaagatgaggctagctacaacgaaaaacgcc

SEQ ID NO: 4891 - DNA, 31 bp, Artificial Sequence
  Description of Artificial Sequence:  Enzymatic Nucleic Acid
gaggaagaggctagctacaacgagataaaac

SEQ ID NO: 4892 - DNA, 31 bp, Artificial Sequence
  Description of Artificial Sequence:  Enzymatic Nucleic Acid
cagcaggaggctagctacaacgagcagagga

SEQ ID NO: 4893 - DNA, 31 bp, Artificial Sequence
  Description of Artificial Sequence:  Enzymatic Nucleic Acid
atgaggcaggctagctacaacgaagcagcag

SEQ ID NO: 4894 - DNA, 31 bp, Artificial Sequence
  Description of Artificial Sequence:  Enzymatic Nucleic Acid
caagaagaggctagctacaacgagaggcata

SEQ ID NO: 4895 - DNA, 31 bp, Artificial Sequence
  Description of Artificial Sequence:  Enzymatic Nucleic Acid
cttgatagggctagctacaacgaccagaaga

SEQ ID NO: 4896 - DNA, 31 bp, Artificial Sequence
  Description of Artificial Sequence:  Enzymatic Nucleic Acid
taccttgaggctagctacaacgaagtccaga

SEQ ID NO: 4897 - DNA, 31 bp, Artificial Sequence
  Description of Artificial Sequence:  Enzymatic Nucleic Acid
gggcaacaggctagctacaacgaaccttgat

SEQ ID NO: 4898 - DNA, 31 bp, Artificial Sequence
  Description of Artificial Sequence:  Enzymatic Nucleic Acid
tcctggaaggctagctacaacgatagaggac

SEQ ID NO: 4899 - DNA, 31 bp, Artificial Sequence
  Description of Artificial Sequence:  Enzymatic Nucleic Acid
gttgatgaggctagctacaacgacctggaat

SEQ ID NO: 4900 - DNA, 31 bp, Artificial Sequence
  Description of Artificial Sequence:  Enzymatic Nucleic Acid
gttgttgaggctagctacaacgagatcctgg

SEQ ID NO: 4901 - DNA, 31 bp, Artificial Sequence
  Description of Artificial Sequence:  Enzymatic Nucleic Acid
gctggttgggctagctacaacgatgatgatc

SEQ ID NO: 4902 - DNA, 31 bp, Artificial Sequence
  Description of Artificial Sequence:  Enzymatic Nucleic Acid
ggtgctggggctagctacaacgatgttgatg

SEQ ID NO: 4903 - DNA, 31 bp, Artificial Sequence
  Description of Artificial Sequence:  Enzymatic Nucleic Acid
ttgcatggggctagctacaacgaccggtgct

SEQ ID NO: 4904 - DNA, 31 bp, Artificial Sequence
  Description of Artificial Sequence:  Enzymatic Nucleic Acid
gttttgcaggctagctacaacgaggtccggt

SEQ ID NO: 4905 - DNA, 31 bp, Artificial Sequence
  Description of Artificial Sequence:  Enzymatic Nucleic Acid
tgtgcaggggctagctacaacgatttgcatg

SEQ ID NO: 4906 - DNA, 31 bp, Artificial Sequence
  Description of Artificial Sequence:  Enzymatic Nucleic Acid
aggagttgggctagctacaacgagcaggttt

SEQ ID NO: 4907 - DNA, 31 bp, Artificial Sequence
  Description of Artificial Sequence:  Enzymatic Nucleic Acid
agcaggagggctagctacaacgatgtgcagg

SEQ ID NO: 4908 - DNA, 31 bp, Artificial Sequence
  Description of Artificial Sequence:  Enzymatic Nucleic Acid
catagaggggctagctacaacgatccttgag

SEQ ID NO: 4909 - DNA, 31 bp, Artificial Sequence
  Description of Artificial Sequence:  Enzymatic Nucleic Acid
gggaaacaggctagctacaacgaagaggttc

SEQ ID NO: 4910 - DNA, 31 bp, Artificial Sequence
  Description of Artificial Sequence:  Enzymatic Nucleic Acid
cagcaacaggctagctacaacgagagggaaa

SEQ ID NO: 4911 - DNA, 31 bp, Artificial Sequence
  Description of Artificial Sequence:  Enzymatic Nucleic Acid
aggttttgggctagctacaacgaacagcaac

SEQ ID NO: 4912 - DNA, 31 bp, Artificial Sequence
  Description of Artificial Sequence:  Enzymatic Nucleic Acid
tccgtaggggctagctacaacgatttgtaca

SEQ ID NO: 4913 - DNA, 31 bp, Artificial Sequence
  Description of Artificial Sequence:  Enzymatic Nucleic Acid
tccgtccgggctagctacaacgaaggttttg

SEQ ID NO: 4914 - DNA, 31 bp, Artificial Sequence
  Description of Artificial Sequence:  Enzymatic Nucleic Acid
agtttccgggctagctacaacgaccgtaggt

SEQ ID NO: 4915 - DNA, 31 bp, Artificial Sequence
  Description of Artificial Sequence:  Enzymatic Nucleic Acid
aggtgcagggctagctacaacgattccgtcc

SEQ ID NO: 4916 - DNA, 31 bp, Artificial Sequence
  Description of Artificial Sequence:  Enzymatic Nucleic Acid
aatacaggggctagctacaacgagcagtttc

SEQ ID NO: 4917 - DNA, 31 bp, Artificial Sequence
  Description of Artificial Sequence:  Enzymatic Nucleic Acid
gatgggaaggctagctacaacgaacaggtgc

SEQ ID NO: 4918 - DNA, 31 bp, Artificial Sequence
  Description of Artificial Sequence:  Enzymatic Nucleic Acid
tgatgggaggctagctacaacgagggaatac

SEQ ID NO: 4919 - DNA, 31 bp, Artificial Sequence
  Description of Artificial Sequence:  Enzymatic Nucleic Acid
caagatgaggctagctacaacgagggatggg

SEQ ID NO: 4920 - DNA, 31 bp, Artificial Sequence
  Description of Artificial Sequence:  Enzymatic Nucleic Acid
gcccaagaggctagctacaacgagatgggat

SEQ ID NO: 4921 - DNA, 31 bp, Artificial Sequence
  Description of Artificial Sequence:  Enzymatic Nucleic Acid
cataggtaggctagctacaacgatttgcgaa

SEQ ID NO: 4922 - DNA, 31 bp, Artificial Sequence
  Description of Artificial Sequence:  Enzymatic Nucleic Acid
cccataggggctagctacaacgaattttgcg

SEQ ID NO: 4923 - DNA, 31 bp, Artificial Sequence
  Description of Artificial Sequence:  Enzymatic Nucleic Acid
cactcccaggctagctacaacgaaggtattt

SEQ ID NO: 4924 - DNA, 31 bp, Artificial Sequence
  Description of Artificial Sequence:  Enzymatic Nucleic Acid
ggcactagggctagctacaacgaaaactgag

SEQ ID NO: 4925 - DNA, 31 bp, Artificial Sequence
  Description of Artificial Sequence:  Enzymatic Nucleic Acid
tgaacaaaggctagctacaacgaggcactag

SEQ ID NO: 4926 - DNA, 31 bp, Artificial Sequence
  Description of Artificial Sequence:  Enzymatic Nucleic Acid
ccagacagggctagctacaacgagggggaaa

SEQ ID NO: 4927 - DNA, 31 bp, Artificial Sequence
  Description of Artificial Sequence:  Enzymatic Nucleic Acid
catccataggctagctacaacgaaactgaaa

SEQ ID NO: 4928 - DNA, 31 bp, Artificial Sequence
  Description of Artificial Sequence:  Enzymatic Nucleic Acid
atcatccaggctagctacaacgaataactga

SEQ ID NO: 4929 - DNA, 31 bp, Artificial Sequence
  Description of Artificial Sequence:  Enzymatic Nucleic Acid
ccacatcaggctagctacaacgaccatataa

SEQ ID NO: 4930 - DNA, 31 bp, Artificial Sequence
  Description of Artificial Sequence:  Enzymatic Nucleic Acid
aaaccacaggctagctacaacgacatccata

SEQ ID NO: 4931 - DNA, 31 bp, Artificial Sequence
  Description of Artificial Sequence:  Enzymatic Nucleic Acid
agatgttgggctagctacaacgaacagactt

SEQ ID NO: 4932 - DNA, 31 bp, Artificial Sequence
  Description of Artificial Sequence:  Enzymatic Nucleic Acid
tcaagatgggctagctacaacgatgtacaga

SEQ ID NO: 4933 - DNA, 31 bp, Artificial Sequence
  Description of Artificial Sequence:  Enzymatic Nucleic Acid
actcaagaggctagctacaacgagttgtaca

SEQ ID NO: 4934 - DNA, 31 bp, Artificial Sequence
  Description of Artificial Sequence:  Enzymatic Nucleic Acid
cagcggcaggctagctacaacgaaaagggac

SEQ ID NO: 4935 - DNA, 31 bp, Artificial Sequence
  Description of Artificial Sequence:  Enzymatic Nucleic Acid
aaaattggggctagctacaacgaaacagcgg

SEQ ID NO: 4936 - DNA, 31 bp, Artificial Sequence
  Description of Artificial Sequence:  Enzymatic Nucleic Acid
aaagaaaaggctagctacaacgatggtaaca

SEQ ID NO: 4937 - DNA, 31 bp, Artificial Sequence
  Description of Artificial Sequence:  Enzymatic Nucleic Acid
taaatgtaggctagctacaacgaacccaaag

SEQ ID NO: 4938 - DNA, 31 bp, Artificial Sequence
  Description of Artificial Sequence:  Enzymatic Nucleic Acid
tttaaatgggctagctacaacgaatacccaa

SEQ ID NO: 4939 - DNA, 31 bp, Artificial Sequence
  Description of Artificial Sequence:  Enzymatic Nucleic Acid
ggtttaaaggctagctacaacgagtataccc

SEQ ID NO: 4940 - DNA, 31 bp, Artificial Sequence
  Description of Artificial Sequence:  Enzymatic Nucleic Acid
tgtgagggggctagctacaacgattaaatgt

SEQ ID NO: 4941 - DNA, 31 bp, Artificial Sequence
  Description of Artificial Sequence:  Enzymatic Nucleic Acid
ttgttttgggctagctacaacgagagggttt

SEQ ID NO: 4942 - DNA, 31 bp, Artificial Sequence
  Description of Artificial Sequence:  Enzymatic Nucleic Acid
tctttttgggctagctacaacgatttgtgag

SEQ ID NO: 4943 - DNA, 31 bp, Artificial Sequence
  Description of Artificial Sequence:  Enzymatic Nucleic Acid
tatccccaggctagctacaacgactttttgt

SEQ ID NO: 4944 - DNA, 31 bp, Artificial Sequence
  Description of Artificial Sequence:  Enzymatic Nucleic Acid
agggaataggctagctacaacgaccccatct

SEQ ID NO: 4945 - DNA, 31 bp, Artificial Sequence
  Description of Artificial Sequence:  Enzymatic Nucleic Acid
taagggaaggctagctacaacgaatccccat

SEQ ID NO: 4946 - DNA, 31 bp, Artificial Sequence
  Description of Artificial Sequence:  Enzymatic Nucleic Acid
ccatgaagggctagctacaacgataagggaa

SEQ ID NO: 4947 - DNA, 31 bp, Artificial Sequence
  Description of Artificial Sequence:  Enzymatic Nucleic Acid
atatcccaggctagctacaacgagaagttaa

SEQ ID NO: 4948 - DNA, 31 bp, Artificial Sequence
  Description of Artificial Sequence:  Enzymatic Nucleic Acid
attacataggctagctacaacgacccatgaa

SEQ ID NO: 4949 - DNA, 31 bp, Artificial Sequence
  Description of Artificial Sequence:  Enzymatic Nucleic Acid
caattacaggctagctacaacgaatcccatg

SEQ ID NO: 4950 - DNA, 31 bp, Artificial Sequence
  Description of Artificial Sequence:  Enzymatic Nucleic Acid
actcccaaggctagctacaacgatacatatc

SEQ ID NO: 4951 - DNA, 31 bp, Artificial Sequence
  Description of Artificial Sequence:  Enzymatic Nucleic Acid
tggcaatgggctagctacaacgagccccaac

SEQ ID NO: 4952 - DNA, 31 bp, Artificial Sequence
  Description of Artificial Sequence:  Enzymatic Nucleic Acid
tgtggcaaggctagctacaacgagtgcccca

SEQ ID NO: 4953 - DNA, 31 bp, Artificial Sequence
  Description of Artificial Sequence:  Enzymatic Nucleic Acid
tgttcctgggctagctacaacgaggcaatgt

SEQ ID NO: 4954 - DNA, 31 bp, Artificial Sequence
  Description of Artificial Sequence:  Enzymatic Nucleic Acid
acaatatgggctagctacaacgatcctgtgg

SEQ ID NO: 4955 - DNA, 31 bp, Artificial Sequence
  Description of Artificial Sequence:  Enzymatic Nucleic Acid
gtacaataggctagctacaacgagttcctgt

SEQ ID NO: 4956 - DNA, 31 bp, Artificial Sequence
  Description of Artificial Sequence:  Enzymatic Nucleic Acid
ttgtacaaggctagctacaacgaatgttcct

SEQ ID NO: 4957 - DNA, 31 bp, Artificial Sequence
  Description of Artificial Sequence:  Enzymatic Nucleic Acid
attttttgggctagctacaacgaacaatatg

SEQ ID NO: 4958 - DNA, 31 bp, Artificial Sequence
  Description of Artificial Sequence:  Enzymatic Nucleic Acid
cattttgaggctagctacaacgatttttgta

SEQ ID NO: 4959 - DNA, 31 bp, Artificial Sequence
  Description of Artificial Sequence:  Enzymatic Nucleic Acid
aaaacacaggctagctacaacgatttgattt

SEQ ID NO: 4960 - DNA, 31 bp, Artificial Sequence
  Description of Artificial Sequence:  Enzymatic Nucleic Acid
acaggaagggctagctacaacgattcctaaa

SEQ ID NO: 4961 - DNA, 31 bp, Artificial Sequence
  Description of Artificial Sequence:  Enzymatic Nucleic Acid
taggcctgggctagctacaacgattacagga

SEQ ID NO: 4962 - DNA, 31 bp, Artificial Sequence
  Description of Artificial Sequence:  Enzymatic Nucleic Acid
ccaatcaaggctagctacaacgaaggcctgt

SEQ ID NO: 4963 - DNA, 31 bp, Artificial Sequence
  Description of Artificial Sequence:  Enzymatic Nucleic Acid
ctttccaaggctagctacaacgacaataggc

SEQ ID NO: 4964 - DNA, 31 bp, Artificial Sequence
  Description of Artificial Sequence:  Enzymatic Nucleic Acid
cgttgacaggctagctacaacgaactttcca

SEQ ID NO: 4965 - DNA, 31 bp, Artificial Sequence
  Description of Artificial Sequence:  Enzymatic Nucleic Acid
acaattcgggctagctacaacgatgacatac

SEQ ID NO: 4966 - DNA, 31 bp, Artificial Sequence
  Description of Artificial Sequence:  Enzymatic Nucleic Acid
acccacaaggctagctacaacgatcgttgac

SEQ ID NO: 4967 - DNA, 31 bp, Artificial Sequence
  Description of Artificial Sequence:  Enzymatic Nucleic Acid
acattgcgggctagctacaacgagaaagggg

SEQ ID NO: 4968 - DNA, 31 bp, Artificial Sequence
  Description of Artificial Sequence:  Enzymatic Nucleic Acid
tatccacaggctagctacaacgatgcgtgaa

SEQ ID NO: 4969 - DNA, 31 bp, Artificial Sequence
  Description of Artificial Sequence:  Enzymatic Nucleic Acid
gcagaataggctagctacaacgaccacattg

SEQ ID NO: 4970 - DNA, 31 bp, Artificial Sequence
  Description of Artificial Sequence:  Enzymatic Nucleic Acid
aagcagaaggctagctacaacgaatccacat

SEQ ID NO: 4971 - DNA, 31 bp, Artificial Sequence
  Description of Artificial Sequence:  Enzymatic Nucleic Acid
taaaggcaggctagctacaacgataaagcag

SEQ ID NO: 4972 - DNA, 31 bp, Artificial Sequence
  Description of Artificial Sequence:  Enzymatic Nucleic Acid
catgcataggctagctacaacgaaaaggcat

SEQ ID NO: 4973 - DNA, 31 bp, Artificial Sequence
  Description of Artificial Sequence:  Enzymatic Nucleic Acid
tgcatgcaggctagctacaacgaataaaggc

SEQ ID NO: 4974 - DNA, 31 bp, Artificial Sequence
  Description of Artificial Sequence:  Enzymatic Nucleic Acid
tgtatgcaggctagctacaacgagcatataa

SEQ ID NO: 4975 - DNA, 31 bp, Artificial Sequence
  Description of Artificial Sequence:  Enzymatic Nucleic Acid
tgcttgtaggctagctacaacgagcatgcat

SEQ ID NO: 4976 - DNA, 31 bp, Artificial Sequence
  Description of Artificial Sequence:  Enzymatic Nucleic Acid
tttgcttgggctagctacaacgaatgcatgc

SEQ ID NO: 4977 - DNA, 31 bp, Artificial Sequence
  Description of Artificial Sequence:  Enzymatic Nucleic Acid
aaagcctgggctagctacaacgatttgcttg

SEQ ID NO: 4978 - DNA, 31 bp, Artificial Sequence
  Description of Artificial Sequence:  Enzymatic Nucleic Acid
cgagaaagggctagctacaacgaaaaagcct

SEQ ID NO: 4979 - DNA, 31 bp, Artificial Sequence
  Description of Artificial Sequence:  Enzymatic Nucleic Acid
cttgtaagggctagctacaacgatggcgaga

SEQ ID NO: 4980 - DNA, 31 bp, Artificial Sequence
  Description of Artificial Sequence:  Enzymatic Nucleic Acid
aggccttgggctagctacaacgaaagttggc

SEQ ID NO: 4981 - DNA, 31 bp, Artificial Sequence
  Description of Artificial Sequence:  Enzymatic Nucleic Acid
acatactgggctagctacaacgattacttag

SEQ ID NO: 4982 - DNA, 31 bp, Artificial Sequence
  Description of Artificial Sequence:  Enzymatic Nucleic Acid
ggttcacaggctagctacaacgaactgttta

SEQ ID NO: 4983 - DNA, 31 bp, Artificial Sequence
  Description of Artificial Sequence:  Enzymatic Nucleic Acid
ggtaaaggggctagctacaacgatcacatac

SEQ ID NO: 4984 - DNA, 31 bp, Artificial Sequence
  Description of Artificial Sequence:  Enzymatic Nucleic Acid
caacggggggctagctacaacgaaaaggttc

SEQ ID NO: 4985 - DNA, 31 bp, Artificial Sequence
  Description of Artificial Sequence:  Enzymatic Nucleic Acid
ccaggccgggctagctacaacgatgccgagc

SEQ ID NO: 4986 - DNA, 31 bp, Artificial Sequence
  Description of Artificial Sequence:  Enzymatic Nucleic Acid
acttggcaggctagctacaacgaagaccagg

SEQ ID NO: 4987 - DNA, 31 bp, Artificial Sequence
  Description of Artificial Sequence:  Enzymatic Nucleic Acid
gggttgcgggctagctacaacgacagcaaac

SEQ ID NO: 4988 - DNA, 31 bp, Artificial Sequence
  Description of Artificial Sequence:  Enzymatic Nucleic Acid
agtgggggggctagctacaacgatgcgtcag

SEQ ID NO: 4989 - DNA, 31 bp, Artificial Sequence
  Description of Artificial Sequence:  Enzymatic Nucleic Acid
ccaaccagggctagctacaacgagggggttg

SEQ ID NO: 4990 - DNA, 31 bp, Artificial Sequence
  Description of Artificial Sequence:  Enzymatic Nucleic Acid
atggcctaggctagctacaacgaggccaagc

SEQ ID NO: 4991 - DNA, 31 bp, Artificial Sequence
  Description of Artificial Sequence:  Enzymatic Nucleic Acid
tgcgctgaggctagctacaacgaggcctatg

SEQ ID NO: 4992 - DNA, 31 bp, Artificial Sequence
  Description of Artificial Sequence:  Enzymatic Nucleic Acid
tccacgcaggctagctacaacgagcgctgat

SEQ ID NO: 4993 - DNA, 31 bp, Artificial Sequence
  Description of Artificial Sequence:  Enzymatic Nucleic Acid
cacaaaggggctagctacaacgatccacgca

SEQ ID NO: 4994 - DNA, 31 bp, Artificial Sequence
  Description of Artificial Sequence:  Enzymatic Nucleic Acid
ggtatggaggctagctacaacgacggcagag

SEQ ID NO: 4995 - DNA, 31 bp, Artificial Sequence
  Description of Artificial Sequence:  Enzymatic Nucleic Acid
ccgcggtaggctagctacaacgaggatcggc

SEQ ID NO: 4996 - DNA, 31 bp, Artificial Sequence
  Description of Artificial Sequence:  Enzymatic Nucleic Acid
ttccgcggggctagctacaacgaatggatcg

SEQ ID NO: 4997 - DNA, 31 bp, Artificial Sequence
  Description of Artificial Sequence:  Enzymatic Nucleic Acid
gctaggagggctagctacaacgatccgcggt

SEQ ID NO: 4998 - DNA, 31 bp, Artificial Sequence
  Description of Artificial Sequence:  Enzymatic Nucleic Acid
ccgatgagggctagctacaacgatttgcccc

SEQ ID NO: 4999 - DNA, 31 bp, Artificial Sequence
  Description of Artificial Sequence:  Enzymatic Nucleic Acid
agtcccgaggctagctacaacgagagttttg

SEQ ID NO: 5000 - DNA, 31 bp, Artificial Sequence
  Description of Artificial Sequence:  Enzymatic Nucleic Acid
attgtcagggctagctacaacgacccgatga

SEQ ID NO: 5001 - DNA, 31 bp, Artificial Sequence
  Description of Artificial Sequence:  Enzymatic Nucleic Acid
cagaattgggctagctacaacgacagtcccg

SEQ ID NO: 5002 - DNA, 31 bp, Artificial Sequence
  Description of Artificial Sequence:  Enzymatic Nucleic Acid
cgacagaaggctagctacaacgatgtcagtc

SEQ ID NO: 5003 - DNA, 31 bp, Artificial Sequence
  Description of Artificial Sequence:  Enzymatic Nucleic Acid
gatgtataggctagctacaacgattgcggga

SEQ ID NO: 5004 - DNA, 31 bp, Artificial Sequence
  Description of Artificial Sequence:  Enzymatic Nucleic Acid
atgatgtaggctagctacaacgaatttgcgg

SEQ ID NO: 5005 - DNA, 31 bp, Artificial Sequence
  Description of Artificial Sequence:  Enzymatic Nucleic Acid
aaatgatgggctagctacaacgaatatttgc

SEQ ID NO: 5006 - DNA, 31 bp, Artificial Sequence
  Description of Artificial Sequence:  Enzymatic Nucleic Acid
ggaaatgaggctagctacaacgagtatattt

SEQ ID NO: 5007 - DNA, 31 bp, Artificial Sequence
  Description of Artificial Sequence:  Enzymatic Nucleic Acid
catggaaaggctagctacaacgagatgtata

SEQ ID NO: 5008 - DNA, 31 bp, Artificial Sequence
  Description of Artificial Sequence:  Enzymatic Nucleic Acid
agcagccaggctagctacaacgaggaaatga

SEQ ID NO: 5009 - DNA, 31 bp, Artificial Sequence
  Description of Artificial Sequence:  Enzymatic Nucleic Acid
ggatccagggctagctacaacgatggcagca

SEQ ID NO: 5010 - DNA, 31 bp, Artificial Sequence
  Description of Artificial Sequence:  Enzymatic Nucleic Acid
gcgtaggaggctagctacaacgaccagttgg

SEQ ID NO: 5011 - DNA, 31 bp, Artificial Sequence
  Description of Artificial Sequence:  Enzymatic Nucleic Acid
gtcccgcgggctagctacaacgaaggatcca

SEQ ID NO: 5012 - DNA, 31 bp, Artificial Sequence
  Description of Artificial Sequence:  Enzymatic Nucleic Acid
aaaggacgggctagctacaacgacccgcgta

SEQ ID NO: 5013 - DNA, 31 bp, Artificial Sequence
  Description of Artificial Sequence:  Enzymatic Nucleic Acid
acgggacgggctagctacaacgaaaacaaag

SEQ ID NO: 5014 - DNA, 31 bp, Artificial Sequence
  Description of Artificial Sequence:  Enzymatic Nucleic Acid
ccgcgggaggctagctacaacgatcagcgcc

SEQ ID NO: 5015 - DNA, 31 bp, Artificial Sequence
  Description of Artificial Sequence:  Enzymatic Nucleic Acid
aggggtcgggctagctacaacgaccgcggga

SEQ ID NO: 5016 - DNA, 31 bp, Artificial Sequence
  Description of Artificial Sequence:  Enzymatic Nucleic Acid
gggaggggggctagctacaacgacgtccgcg

SEQ ID NO: 5017 - DNA, 31 bp, Artificial Sequence
  Description of Artificial Sequence:  Enzymatic Nucleic Acid
gcgggcggggctagctacaacgaagagcccc

SEQ ID NO: 5018 - DNA, 31 bp, Artificial Sequence
  Description of Artificial Sequence:  Enzymatic Nucleic Acid
cggtacaaggctagctacaacgaaggcggag

SEQ ID NO: 5019 - DNA, 31 bp, Artificial Sequence
  Description of Artificial Sequence:  Enzymatic Nucleic Acid
acggtcggggctagctacaacgaacaatagg

SEQ ID NO: 5020 - DNA, 31 bp, Artificial Sequence
  Description of Artificial Sequence:  Enzymatic Nucleic Acid
gtggacggggctagctacaacgacggtacaa

SEQ ID NO: 5021 - DNA, 31 bp, Artificial Sequence
  Description of Artificial Sequence:  Enzymatic Nucleic Acid
gcgccccgggctagctacaacgaggacggtc

SEQ ID NO: 5022 - DNA, 31 bp, Artificial Sequence
  Description of Artificial Sequence:  Enzymatic Nucleic Acid
aagagaggggctagctacaacgagcgccccg

SEQ ID NO: 5023 - DNA, 31 bp, Artificial Sequence
  Description of Artificial Sequence:  Enzymatic Nucleic Acid
agtccgcgggctagctacaacgaaaagagag

SEQ ID NO: 5024 - DNA, 31 bp, Artificial Sequence
  Description of Artificial Sequence:  Enzymatic Nucleic Acid
acggggagggctagctacaacgaccgcgtaa

SEQ ID NO: 5025 - DNA, 31 bp, Artificial Sequence
  Description of Artificial Sequence:  Enzymatic Nucleic Acid
ccggcagaggctagctacaacgagagaaggc

SEQ ID NO: 5026 - DNA, 31 bp, Artificial Sequence
  Description of Artificial Sequence:  Enzymatic Nucleic Acid
gcacacggggctagctacaacgaccggcaga

SEQ ID NO: 5027 - DNA, 31 bp, Artificial Sequence
  Description of Artificial Sequence:  Enzymatic Nucleic Acid
aagcgaagggctagctacaacgagcacacgg

SEQ ID NO: 5028 - DNA, 31 bp, Artificial Sequence
  Description of Artificial Sequence:  Enzymatic Nucleic Acid
tgcagaggggctagctacaacgagaagcgaa

SEQ ID NO: 5029 - DNA, 31 bp, Artificial Sequence
  Description of Artificial Sequence:  Enzymatic Nucleic Acid
atgcgacgggctagctacaacgagcagaggt

SEQ ID NO: 5030 - DNA, 31 bp, Artificial Sequence
  Description of Artificial Sequence:  Enzymatic Nucleic Acid
ggtctccaggctagctacaacgagcgacgtg

SEQ ID NO: 5031 - DNA, 31 bp, Artificial Sequence
  Description of Artificial Sequence:  Enzymatic Nucleic Acid
cacggtggggctagctacaacgactccatgc

SEQ ID NO: 5032 - DNA, 31 bp, Artificial Sequence
  Description of Artificial Sequence:  Enzymatic Nucleic Acid
gttcacggggctagctacaacgaggtctcca

SEQ ID NO: 5033 - DNA, 31 bp, Artificial Sequence
  Description of Artificial Sequence:  Enzymatic Nucleic Acid
tgtgggcgggctagctacaacgatcacggtg

SEQ ID NO: 5034 - DNA, 31 bp, Artificial Sequence
  Description of Artificial Sequence:  Enzymatic Nucleic Acid
tgggcaggggctagctacaacgatcctgtgg

SEQ ID NO: 5035 - DNA, 31 bp, Artificial Sequence
  Description of Artificial Sequence:  Enzymatic Nucleic Acid
tcctcttaggctagctacaacgagcaagacc

SEQ ID NO: 5036 - DNA, 31 bp, Artificial Sequence
  Description of Artificial Sequence:  Enzymatic Nucleic Acid
tccaagagggctagctacaacgacctcttat

SEQ ID NO: 5037 - DNA, 31 bp, Artificial Sequence
  Description of Artificial Sequence:  Enzymatic Nucleic Acid
gctgaaagggctagctacaacgaccaagagt

SEQ ID NO: 5038 - DNA, 31 bp, Artificial Sequence
  Description of Artificial Sequence:  Enzymatic Nucleic Acid
cgttgacaggctagctacaacgatgctgaaa

SEQ ID NO: 5039 - DNA, 31 bp, Artificial Sequence
  Description of Artificial Sequence:  Enzymatic Nucleic Acid
gtcggtcgggctagctacaacgatgacattg

SEQ ID NO: 5040 - DNA, 31 bp, Artificial Sequence
  Description of Artificial Sequence:  Enzymatic Nucleic Acid
aaggtcggggctagctacaacgacgttgaca

SEQ ID NO: 5041 - DNA, 31 bp, Artificial Sequence
  Description of Artificial Sequence:  Enzymatic Nucleic Acid
cctcaaggggctagctacaacgacggtcgtt

SEQ ID NO: 5042 - DNA, 31 bp, Artificial Sequence
  Description of Artificial Sequence:  Enzymatic Nucleic Acid
ttgaagtaggctagctacaacgagcctcaag

SEQ ID NO: 5043 - DNA, 31 bp, Artificial Sequence
  Description of Artificial Sequence:  Enzymatic Nucleic Acid
ctttgaagggctagctacaacgaatgcctca

SEQ ID NO: 5044 - DNA, 31 bp, Artificial Sequence
  Description of Artificial Sequence:  Enzymatic Nucleic Acid
acacacagggctagctacaacgactttgaag

SEQ ID NO: 5045 - DNA, 31 bp, Artificial Sequence
  Description of Artificial Sequence:  Enzymatic Nucleic Acid
cccactcaggctagctacaacgataaacaca

SEQ ID NO: 5046 - DNA, 31 bp, Artificial Sequence
  Description of Artificial Sequence:  Enzymatic Nucleic Acid
cctcctagggctagctacaacgaacaaagac

SEQ ID NO: 5047 - DNA, 31 bp, Artificial Sequence
  Description of Artificial Sequence:  Enzymatic Nucleic Acid
ccaatttaggctagctacaacgagcctacag

SEQ ID NO: 5048 - DNA, 31 bp, Artificial Sequence
  Description of Artificial Sequence:  Enzymatic Nucleic Acid
cacaccaaggctagctacaacgattatgcct

SEQ ID NO: 5049 - DNA, 31 bp, Artificial Sequence
  Description of Artificial Sequence:  Enzymatic Nucleic Acid
ggtgctggggctagctacaacgagaacacac

SEQ ID NO: 5050 - DNA, 31 bp, Artificial Sequence
  Description of Artificial Sequence:  Enzymatic Nucleic Acid
ttgcatggggctagctacaacgagctggtga

SEQ ID NO: 5051 - DNA, 31 bp, Artificial Sequence
  Description of Artificial Sequence:  Enzymatic Nucleic Acid
aagttgcaggctagctacaacgaggtgctgg

SEQ ID NO: 5052 - DNA, 31 bp, Artificial Sequence
  Description of Artificial Sequence:  Enzymatic Nucleic Acid
tgaaaaagggctagctacaacgatgcatggt

SEQ ID NO: 5053 - DNA, 31 bp, Artificial Sequence
  Description of Artificial Sequence:  Enzymatic Nucleic Acid
ggcagaggggctagctacaacgagaaaaagt

SEQ ID NO: 5054 - DNA, 31 bp, Artificial Sequence
  Description of Artificial Sequence:  Enzymatic Nucleic Acid
tgagatgaggctagctacaacgataggcaga

SEQ ID NO: 5055 - DNA, 31 bp, Artificial Sequence
  Description of Artificial Sequence:  Enzymatic Nucleic Acid
acatgagaggctagctacaacgagattaggc

SEQ ID NO: 5056 - DNA, 31 bp, Artificial Sequence
  Description of Artificial Sequence:  Enzymatic Nucleic Acid
catgaacaggctagctacaacgagagatgat

SEQ ID NO: 5057 - DNA, 31 bp, Artificial Sequence
  Description of Artificial Sequence:  Enzymatic Nucleic Acid
gtaggacaggctagctacaacgagaacatga

SEQ ID NO: 5058 - DNA, 31 bp, Artificial Sequence
  Description of Artificial Sequence:  Enzymatic Nucleic Acid
ttgaacagggctagctacaacgaaggacatg

SEQ ID NO: 5059 - DNA, 31 bp, Artificial Sequence
  Description of Artificial Sequence:  Enzymatic Nucleic Acid
aatgtccaggctagctacaacgagccccaaa

SEQ ID NO: 5060 - DNA, 31 bp, Artificial Sequence
  Description of Artificial Sequence:  Enzymatic Nucleic Acid
ggtcaatgggctagctacaacgaccatgccc

SEQ ID NO: 5061 - DNA, 31 bp, Artificial Sequence
  Description of Artificial Sequence:  Enzymatic Nucleic Acid
cgggtcaaggctagctacaacgagtccatgc

SEQ ID NO: 5062 - DNA, 31 bp, Artificial Sequence
  Description of Artificial Sequence:  Enzymatic Nucleic Acid
tatacgggggctagctacaacgacaatgtcc

SEQ ID NO: 5063 - DNA, 31 bp, Artificial Sequence
  Description of Artificial Sequence:  Enzymatic Nucleic Acid
attctttaggctagctacaacgaacgggtca

SEQ ID NO: 5064 - DNA, 31 bp, Artificial Sequence
  Description of Artificial Sequence:  Enzymatic Nucleic Acid
gctccaaaggctagctacaacgatctttata

SEQ ID NO: 5065 - DNA, 31 bp, Artificial Sequence
  Description of Artificial Sequence:  Enzymatic Nucleic Acid
aaagagagggctagctacaacgaaactccac

SEQ ID NO: 5066 - DNA, 31 bp, Artificial Sequence
  Description of Artificial Sequence:  Enzymatic Nucleic Acid
gaaagaagggctagctacaacgacagaaggc

SEQ ID NO: 5067 - DNA, 31 bp, Artificial Sequence
  Description of Artificial Sequence:  Enzymatic Nucleic Acid
atctcgaaggctagctacaacgaagaaggaa

SEQ ID NO: 5068 - DNA, 31 bp, Artificial Sequence
  Description of Artificial Sequence:  Enzymatic Nucleic Acid
cgaggagaggctagctacaacgactcgaata

SEQ ID NO: 5069 - DNA, 31 bp, Artificial Sequence
  Description of Artificial Sequence:  Enzymatic Nucleic Acid
aggcggtgggctagctacaacgacgaggaga

SEQ ID NO: 5070 - DNA, 31 bp, Artificial Sequence
  Description of Artificial Sequence:  Enzymatic Nucleic Acid
agaggcggggctagctacaacgagtcgagga

SEQ ID NO: 5071 - DNA, 31 bp, Artificial Sequence
  Description of Artificial Sequence:  Enzymatic Nucleic Acid
ccccccgaggctagctacaacgaacagagca

SEQ ID NO: 5072 - DNA, 31 bp, Artificial Sequence
  Description of Artificial Sequence:  Enzymatic Nucleic Acid
gaacaatgggctagctacaacgatccggaga

SEQ ID NO: 5073 - DNA, 31 bp, Artificial Sequence
  Description of Artificial Sequence:  Enzymatic Nucleic Acid
gtgaacaaggctagctacaacgagttccgga

SEQ ID NO: 5074 - DNA, 31 bp, Artificial Sequence
  Description of Artificial Sequence:  Enzymatic Nucleic Acid
tggtgaggggctagctacaacgagaacaatg

SEQ ID NO: 5075 - DNA, 31 bp, Artificial Sequence
  Description of Artificial Sequence:  Enzymatic Nucleic Acid
ccgtatggggctagctacaacgagaggtgaa

SEQ ID NO: 5076 - DNA, 31 bp, Artificial Sequence
  Description of Artificial Sequence:  Enzymatic Nucleic Acid
gtgccgtaggctagctacaacgaggtgaggt

SEQ ID NO: 5077 - DNA, 31 bp, Artificial Sequence
  Description of Artificial Sequence:  Enzymatic Nucleic Acid
gagtgccgggctagctacaacgaatggtgag

SEQ ID NO: 5078 - DNA, 31 bp, Artificial Sequence
  Description of Artificial Sequence:  Enzymatic Nucleic Acid
tgcctgagggctagctacaacgagccgtatg

SEQ ID NO: 5079 - DNA, 31 bp, Artificial Sequence
  Description of Artificial Sequence:  Enzymatic Nucleic Acid
acacagaaggctagctacaacgaagcttgcc

SEQ ID NO: 5080 - DNA, 31 bp, Artificial Sequence
  Description of Artificial Sequence:  Enzymatic Nucleic Acid
tagattcaggctagctacaacgacaactcac

SEQ ID NO: 5081 - DNA, 31 bp, Artificial Sequence
  Description of Artificial Sequence:  Enzymatic Nucleic Acid
tggctagaggctagctacaacgatcatcaac

SEQ ID NO: 5082 - DNA, 31 bp, Artificial Sequence
  Description of Artificial Sequence:  Enzymatic Nucleic Acid
cacccaggggctagctacaacgaggctagat

SEQ ID NO: 5083 - DNA, 31 bp, Artificial Sequence
  Description of Artificial Sequence:  Enzymatic Nucleic Acid
cttccaaaggctagctacaacgatacttccc

SEQ ID NO: 5084 - DNA, 31 bp, Artificial Sequence
  Description of Artificial Sequence:  Enzymatic Nucleic Acid
atgctggaggctagctacaacgacttccaaa

SEQ ID NO: 5085 - DNA, 31 bp, Artificial Sequence
  Description of Artificial Sequence:  Enzymatic Nucleic Acid
tccctggaggctagctacaacgagctggatc

SEQ ID NO: 5086 - DNA, 31 bp, Artificial Sequence
  Description of Artificial Sequence:  Enzymatic Nucleic Acid
actactaaggctagctacaacgatccctgga

SEQ ID NO: 5087 - DNA, 31 bp, Artificial Sequence
  Description of Artificial Sequence:  Enzymatic Nucleic Acid
cgttgacaggctagctacaacgaagctgact

SEQ ID NO: 5088 - DNA, 31 bp, Artificial Sequence
  Description of Artificial Sequence:  Enzymatic Nucleic Acid
tattaacgggctagctacaacgatgacatag

SEQ ID NO: 5089 - DNA, 31 bp, Artificial Sequence
  Description of Artificial Sequence:  Enzymatic Nucleic Acid
ggcccataggctagctacaacgataacgttg

SEQ ID NO: 5090 - DNA, 31 bp, Artificial Sequence
  Description of Artificial Sequence:  Enzymatic Nucleic Acid
taggcccaggctagctacaacgaattaacgt

SEQ ID NO: 5091 - DNA, 31 bp, Artificial Sequence
  Description of Artificial Sequence:  Enzymatic Nucleic Acid
ttgtctgaggctagctacaacgattttaggc

SEQ ID NO: 5092 - DNA, 31 bp, Artificial Sequence
  Description of Artificial Sequence:  Enzymatic Nucleic Acid
aatagttgggctagctacaacgactgatttt

SEQ ID NO: 5093 - DNA, 31 bp, Artificial Sequence
  Description of Artificial Sequence:  Enzymatic Nucleic Acid
cacaatagggctagctacaacgatgtctgat

SEQ ID NO: 5094 - DNA, 31 bp, Artificial Sequence
  Description of Artificial Sequence:  Enzymatic Nucleic Acid
aaccacaaggctagctacaacgaagttgtct

SEQ ID NO: 5095 - DNA, 31 bp, Artificial Sequence
  Description of Artificial Sequence:  Enzymatic Nucleic Acid
aggaaatgggctagctacaacgagaaaccac

SEQ ID NO: 5096 - DNA, 31 bp, Artificial Sequence
  Description of Artificial Sequence:  Enzymatic Nucleic Acid
acaggaaaggctagctacaacgagtgaaacc

SEQ ID NO: 5097 - DNA, 31 bp, Artificial Sequence
  Description of Artificial Sequence:  Enzymatic Nucleic Acid
cccaaaagggctagctacaacgaaagacagg

SEQ ID NO: 5098 - DNA, 31 bp, Artificial Sequence
  Description of Artificial Sequence:  Enzymatic Nucleic Acid
aagaacagggctagctacaacgattctcgcc

SEQ ID NO: 5099 - DNA, 31 bp, Artificial Sequence
  Description of Artificial Sequence:  Enzymatic Nucleic Acid
accaaataggctagctacaacgatcaagaac

SEQ ID NO: 5100 - DNA, 31 bp, Artificial Sequence
  Description of Artificial Sequence:  Enzymatic Nucleic Acid
acaccaaaggctagctacaacgaattcaaga

SEQ ID NO: 5101 - DNA, 31 bp, Artificial Sequence
  Description of Artificial Sequence:  Enzymatic Nucleic Acid
agtgcgaaggctagctacaacgaccacactc

SEQ ID NO: 5102 - DNA, 31 bp, Artificial Sequence
  Description of Artificial Sequence:  Enzymatic Nucleic Acid
aggaggagggctagctacaacgagcgaatcc

SEQ ID NO: 5103 - DNA, 31 bp, Artificial Sequence
  Description of Artificial Sequence:  Enzymatic Nucleic Acid
ggtctataggctagctacaacgagcaggagg

SEQ ID NO: 5104 - DNA, 31 bp, Artificial Sequence
  Description of Artificial Sequence:  Enzymatic Nucleic Acid
gtggtctaggctagctacaacgaatgcagga

SEQ ID NO: 5105 - DNA, 31 bp, Artificial Sequence
  Description of Artificial Sequence:  Enzymatic Nucleic Acid
tttggtggggctagctacaacgactatatgc

SEQ ID NO: 5106 - DNA, 31 bp, Artificial Sequence
  Description of Artificial Sequence:  Enzymatic Nucleic Acid
gcatttggggctagctacaacgaggtctata

SEQ ID NO: 5107 - DNA, 31 bp, Artificial Sequence
  Description of Artificial Sequence:  Enzymatic Nucleic Acid
taggggcaggctagctacaacgattggtggt

SEQ ID NO: 5108 - DNA, 31 bp, Artificial Sequence
  Description of Artificial Sequence:  Enzymatic Nucleic Acid
tgataagaggctagctacaacgaaggggcat

SEQ ID NO: 5109 - DNA, 31 bp, Artificial Sequence
  Description of Artificial Sequence:  Enzymatic Nucleic Acid
agtgttgaggctagctacaacgaaagatagg

SEQ ID NO: 5110 - DNA, 31 bp, Artificial Sequence
  Description of Artificial Sequence:  Enzymatic Nucleic Acid
cggaagtgggctagctacaacgatgataaga

SEQ ID NO: 5111 - DNA, 31 bp, Artificial Sequence
  Description of Artificial Sequence:  Enzymatic Nucleic Acid
tccggaagggctagctacaacgagttgataa

SEQ ID NO: 5112 - DNA, 31 bp, Artificial Sequence
  Description of Artificial Sequence:  Enzymatic Nucleic Acid
aacagtagggctagctacaacgattccggaa

SEQ ID NO: 5113 - DNA, 31 bp, Artificial Sequence
  Description of Artificial Sequence:  Enzymatic Nucleic Acid
aacaacagggctagctacaacgaagtttccg

SEQ ID NO: 5114 - DNA, 31 bp, Artificial Sequence
  Description of Artificial Sequence:  Enzymatic Nucleic Acid
cctcttcgggctagctacaacgactaacaac

SEQ ID NO: 5115 - DNA, 31 bp, Artificial Sequence
  Description of Artificial Sequence:  Enzymatic Nucleic Acid
cgagggagggctagctacaacgatcttcttc

SEQ ID NO: 5116 - DNA, 31 bp, Artificial Sequence
  Description of Artificial Sequence:  Enzymatic Nucleic Acid
gaccttcgggctagctacaacgactgcgagg

SEQ ID NO: 5117 - DNA, 31 bp, Artificial Sequence
  Description of Artificial Sequence:  Enzymatic Nucleic Acid
cgcggcgaggctagctacaacgatgagacct

SEQ ID NO: 5118 - DNA, 31 bp, Artificial Sequence
  Description of Artificial Sequence:  Enzymatic Nucleic Acid
gattgagaggctagctacaacgacttctgcg

SEQ ID NO: 5119 - DNA, 31 bp, Artificial Sequence
  Description of Artificial Sequence:  Enzymatic Nucleic Acid
tcccgagaggctagctacaacgatgagatct

SEQ ID NO: 5120 - DNA, 31 bp, Artificial Sequence
  Description of Artificial Sequence:  Enzymatic Nucleic Acid
cattgagaggctagctacaacgatcccgaga

SEQ ID NO: 5121 - DNA, 31 bp, Artificial Sequence
  Description of Artificial Sequence:  Enzymatic Nucleic Acid
tactaacaggctagctacaacgatgagattc

SEQ ID NO: 5122 - DNA, 31 bp, Artificial Sequence
  Description of Artificial Sequence:  Enzymatic Nucleic Acid
ccaaggaaggctagctacaacgaactaacat

SEQ ID NO: 5123 - DNA, 31 bp, Artificial Sequence
  Description of Artificial Sequence:  Enzymatic Nucleic Acid
cttatgtgggctagctacaacgaccaaggaa

SEQ ID NO: 5124 - DNA, 31 bp, Artificial Sequence
  Description of Artificial Sequence:  Enzymatic Nucleic Acid
accttatgggctagctacaacgagtccaagg

SEQ ID NO: 5125 - DNA, 31 bp, Artificial Sequence
  Description of Artificial Sequence:  Enzymatic Nucleic Acid
ccaccttaggctagctacaacgagtgtccaa

SEQ ID NO: 5126 - DNA, 31 bp, Artificial Sequence
  Description of Artificial Sequence:  Enzymatic Nucleic Acid
ccgtaaagggctagctacaacgattcccacc

SEQ ID NO: 5127 - DNA, 31 bp, Artificial Sequence
  Description of Artificial Sequence:  Enzymatic Nucleic Acid
aagccccgggctagctacaacgaaaagtttc

SEQ ID NO: 5128 - DNA, 31 bp, Artificial Sequence
  Description of Artificial Sequence:  Enzymatic Nucleic Acid
tagaagaaggctagctacaacgaaaagcccc

SEQ ID NO: 5129 - DNA, 31 bp, Artificial Sequence
  Description of Artificial Sequence:  Enzymatic Nucleic Acid
aggtaccgggctagctacaacgaagaagaat

SEQ ID NO: 5130 - DNA, 31 bp, Artificial Sequence
  Description of Artificial Sequence:  Enzymatic Nucleic Acid
aagcaaggggctagctacaacgaaccgtaga

SEQ ID NO: 5131 - DNA, 31 bp, Artificial Sequence
  Description of Artificial Sequence:  Enzymatic Nucleic Acid
atttaggaggctagctacaacgataaagcaa

SEQ ID NO: 5132 - DNA, 31 bp, Artificial Sequence
  Description of Artificial Sequence:  Enzymatic Nucleic Acid
gtttgccaggctagctacaacgattaggatt

SEQ ID NO: 5133 - DNA, 31 bp, Artificial Sequence
  Description of Artificial Sequence:  Enzymatic Nucleic Acid
agaaggagggctagctacaacgattgccatt

SEQ ID NO: 5134 - DNA, 31 bp, Artificial Sequence
  Description of Artificial Sequence:  Enzymatic Nucleic Acid
aatgaatgggctagctacaacgacaggaaaa

SEQ ID NO: 5135 - DNA, 31 bp, Artificial Sequence
  Description of Artificial Sequence:  Enzymatic Nucleic Acid
caaatgaaggctagctacaacgagtcaggaa

SEQ ID NO: 5136 - DNA, 31 bp, Artificial Sequence
  Description of Artificial Sequence:  Enzymatic Nucleic Acid
cctgcaaaggctagctacaacgagaatgtca

SEQ ID NO: 5137 - DNA, 31 bp, Artificial Sequence
  Description of Artificial Sequence:  Enzymatic Nucleic Acid
caacaatgggctagctacaacgacctcctgc

SEQ ID NO: 5138 - DNA, 31 bp, Artificial Sequence
  Description of Artificial Sequence:  Enzymatic Nucleic Acid
atcaacaaggctagctacaacgagtcctcct

SEQ ID NO: 5139 - DNA, 31 bp, Artificial Sequence
  Description of Artificial Sequence:  Enzymatic Nucleic Acid
tacatctaggctagctacaacgacaacaatg

SEQ ID NO: 5140 - DNA, 31 bp, Artificial Sequence
  Description of Artificial Sequence:  Enzymatic Nucleic Acid
tgcttacaggctagctacaacgactatcaac

SEQ ID NO: 5141 - DNA, 31 bp, Artificial Sequence
  Description of Artificial Sequence:  Enzymatic Nucleic Acid
cccacaaaggctagctacaacgatgcttaca

SEQ ID NO: 5142 - DNA, 31 bp, Artificial Sequence
  Description of Artificial Sequence:  Enzymatic Nucleic Acid
atttactgggctagctacaacgaaaggggcc

SEQ ID NO: 5143 - DNA, 31 bp, Artificial Sequence
  Description of Artificial Sequence:  Enzymatic Nucleic Acid
tgttttcaggctagctacaacgattactgta

SEQ ID NO: 5144 - DNA, 31 bp, Artificial Sequence
  Description of Artificial Sequence:  Enzymatic Nucleic Acid
gtctcctgggctagctacaacgatttcattt

SEQ ID NO: 5145 - DNA, 31 bp, Artificial Sequence
  Description of Artificial Sequence:  Enzymatic Nucleic Acid
aatttaagggctagctacaacgactcctgtt

SEQ ID NO: 5146 - DNA, 31 bp, Artificial Sequence
  Description of Artificial Sequence:  Enzymatic Nucleic Acid
atagttaaggctagctacaacgattaagtct

SEQ ID NO: 5147 - DNA, 31 bp, Artificial Sequence
  Description of Artificial Sequence:  Enzymatic Nucleic Acid
aggcatagggctagctacaacgataatttaa

SEQ ID NO: 5148 - DNA, 31 bp, Artificial Sequence
  Description of Artificial Sequence:  Enzymatic Nucleic Acid
agcaggcaggctagctacaacgaagttaatt

SEQ ID NO: 5149 - DNA, 31 bp, Artificial Sequence
  Description of Artificial Sequence:  Enzymatic Nucleic Acid
cattgggaggctagctacaacgaaaaaccta

SEQ ID NO: 5150 - DNA, 31 bp, Artificial Sequence
  Description of Artificial Sequence:  Enzymatic Nucleic Acid
tagtaacaggctagctacaacgatgggataa

SEQ ID NO: 5151 - DNA, 31 bp, Artificial Sequence
  Description of Artificial Sequence:  Enzymatic Nucleic Acid
atatttagggctagctacaacgaaacattgg

SEQ ID NO: 5152 - DNA, 31 bp, Artificial Sequence
  Description of Artificial Sequence:  Enzymatic Nucleic Acid
ggcaaataggctagctacaacgattagtaac

SEQ ID NO: 5153 - DNA, 31 bp, Artificial Sequence
  Description of Artificial Sequence:  Enzymatic Nucleic Acid
agggcaaaggctagctacaacgaatttagta

SEQ ID NO: 5154 - DNA, 31 bp, Artificial Sequence
  Description of Artificial Sequence:  Enzymatic Nucleic Acid
tccctttaggctagctacaacgactaagggc

SEQ ID NO: 5155 - DNA, 31 bp, Artificial Sequence
  Description of Artificial Sequence:  Enzymatic Nucleic Acid
cggtttgaggctagctacaacgaccctttat

SEQ ID NO: 5156 - DNA, 31 bp, Artificial Sequence
  Description of Artificial Sequence:  Enzymatic Nucleic Acid
taatacggggctagctacaacgattgatccc

SEQ ID NO: 5157 - DNA, 31 bp, Artificial Sequence
  Description of Artificial Sequence:  Enzymatic Nucleic Acid
ctggataaggctagctacaacgaacggtttg

SEQ ID NO: 5158 - DNA, 31 bp, Artificial Sequence
  Description of Artificial Sequence:  Enzymatic Nucleic Acid
actctggaggctagctacaacgaaatacggt

SEQ ID NO: 5159 - DNA, 31 bp, Artificial Sequence
  Description of Artificial Sequence:  Enzymatic Nucleic Acid
taactacaggctagctacaacgaactctgga

SEQ ID NO: 5160 - DNA, 31 bp, Artificial Sequence
  Description of Artificial Sequence:  Enzymatic Nucleic Acid
agtaatgaggctagctacaacgataactaca

SEQ ID NO: 5161 - DNA, 31 bp, Artificial Sequence
  Description of Artificial Sequence:  Enzymatic Nucleic Acid
ggaagtaaggctagctacaacgagattaact

SEQ ID NO: 5162 - DNA, 31 bp, Artificial Sequence
  Description of Artificial Sequence:  Enzymatic Nucleic Acid
tctggaagggctagctacaacgaaatgatta

SEQ ID NO: 5163 - DNA, 31 bp, Artificial Sequence
  Description of Artificial Sequence:  Enzymatic Nucleic Acid
atgtcgcgggctagctacaacgactggaagt

SEQ ID NO: 5164 - DNA, 31 bp, Artificial Sequence
  Description of Artificial Sequence:  Enzymatic Nucleic Acid
aaataatgggctagctacaacgacgcgtctg

SEQ ID NO: 5165 - DNA, 31 bp, Artificial Sequence
  Description of Artificial Sequence:  Enzymatic Nucleic Acid
gtaaataaggctagctacaacgagtcgcgtc

SEQ ID NO: 5166 - DNA, 31 bp, Artificial Sequence
  Description of Artificial Sequence:  Enzymatic Nucleic Acid
tgtgtaaaggctagctacaacgaaatgtcgc

SEQ ID NO: 5167 - DNA, 31 bp, Artificial Sequence
  Description of Artificial Sequence:  Enzymatic Nucleic Acid
agagtgtgggctagctacaacgaaaataatg

SEQ ID NO: 5168 - DNA, 31 bp, Artificial Sequence
  Description of Artificial Sequence:  Enzymatic Nucleic Acid
aaagagtgggctagctacaacgagtaaataa

SEQ ID NO: 5169 - DNA, 31 bp, Artificial Sequence
  Description of Artificial Sequence:  Enzymatic Nucleic Acid
ccaaagagggctagctacaacgagtgtaaat

SEQ ID NO: 5170 - DNA, 31 bp, Artificial Sequence
  Description of Artificial Sequence:  Enzymatic Nucleic Acid
atataagaggctagctacaacgaccccgcct

SEQ ID NO: 5171 - DNA, 31 bp, Artificial Sequence
  Description of Artificial Sequence:  Enzymatic Nucleic Acid
cttttataggctagctacaacgaaagatccc

SEQ ID NO: 5172 - DNA, 31 bp, Artificial Sequence
  Description of Artificial Sequence:  Enzymatic Nucleic Acid
ctcttttaggctagctacaacgaataagatc

SEQ ID NO: 5173 - DNA, 31 bp, Artificial Sequence
  Description of Artificial Sequence:  Enzymatic Nucleic Acid
gctacgtgggctagctacaacgaggactctc

SEQ ID NO: 5174 - DNA, 31 bp, Artificial Sequence
  Description of Artificial Sequence:  Enzymatic Nucleic Acid
gcgctacgggctagctacaacgagtggactc

SEQ ID NO: 5175 - DNA, 31 bp, Artificial Sequence
  Description of Artificial Sequence:  Enzymatic Nucleic Acid
ccgcaaaaggctagctacaacgagaggcgct

SEQ ID NO: 5176 - DNA, 31 bp, Artificial Sequence
  Description of Artificial Sequence:  Enzymatic Nucleic Acid
gaatatggggctagctacaacgagacccgca

SEQ ID NO: 5177 - DNA, 31 bp, Artificial Sequence
  Description of Artificial Sequence:  Enzymatic Nucleic Acid
caagaataggctagctacaacgaggtgaccc

SEQ ID NO: 5178 - DNA, 31 bp, Artificial Sequence
  Description of Artificial Sequence:  Enzymatic Nucleic Acid
cccaagaaggctagctacaacgaatggtgac

SEQ ID NO: 5179 - DNA, 31 bp, Artificial Sequence
  Description of Artificial Sequence:  Enzymatic Nucleic Acid
agatcttgggctagctacaacgatcccaaga

SEQ ID NO: 5180 - DNA, 31 bp, Artificial Sequence
  Description of Artificial Sequence:  Enzymatic Nucleic Acid
gctgtagaggctagctacaacgacttgttcc

SEQ ID NO: 5181 - DNA, 31 bp, Artificial Sequence
  Description of Artificial Sequence:  Enzymatic Nucleic Acid
ccatgctgggctagctacaacgaagatcttg

SEQ ID NO: 5182 - DNA, 31 bp, Artificial Sequence
  Description of Artificial Sequence:  Enzymatic Nucleic Acid
acctcccaggctagctacaacgagctgtaga

SEQ ID NO: 5183 - DNA, 31 bp, Artificial Sequence
  Description of Artificial Sequence:  Enzymatic Nucleic Acid
tttcgaggggctagctacaacgattggaaga

SEQ ID NO: 5184 - DNA, 31 bp, Artificial Sequence
  Description of Artificial Sequence:  Enzymatic Nucleic Acid
tgtccccaggctagctacaacgagccttttc

SEQ ID NO: 5185 - DNA, 31 bp, Artificial Sequence
  Description of Artificial Sequence:  Enzymatic Nucleic Acid
aagatttgggctagctacaacgaccccatgc

SEQ ID NO: 5186 - DNA, 31 bp, Artificial Sequence
  Description of Artificial Sequence:  Enzymatic Nucleic Acid
cagaaagaggctagctacaacgattgtcccc

SEQ ID NO: 5187 - DNA, 31 bp, Artificial Sequence
  Description of Artificial Sequence:  Enzymatic Nucleic Acid
ccaggggaggctagctacaacgatggggaca

SEQ ID NO: 5188 - DNA, 31 bp, Artificial Sequence
  Description of Artificial Sequence:  Enzymatic Nucleic Acid
gggaagaaggctagctacaacgacccagggg

SEQ ID NO: 5189 - DNA, 31 bp, Artificial Sequence
  Description of Artificial Sequence:  Enzymatic Nucleic Acid
actgatgaggctagctacaacgacggggaag

SEQ ID NO: 5190 - DNA, 31 bp, Artificial Sequence
  Description of Artificial Sequence:  Enzymatic Nucleic Acid
ccaactgaggctagctacaacgagatcgggg

SEQ ID NO: 5191 - DNA, 31 bp, Artificial Sequence
  Description of Artificial Sequence:  Enzymatic Nucleic Acid
atgcagggggctagctacaacgaccaactga

SEQ ID NO: 5192 - DNA, 31 bp, Artificial Sequence
  Description of Artificial Sequence:  Enzymatic Nucleic Acid
gctttgaaggctagctacaacgagcagggtc

SEQ ID NO: 5193 - DNA, 31 bp, Artificial Sequence
  Description of Artificial Sequence:  Enzymatic Nucleic Acid
ttactgagggctagctacaacgatggctttg

SEQ ID NO: 5194 - DNA, 31 bp, Artificial Sequence
  Description of Artificial Sequence:  Enzymatic Nucleic Acid
aatctggaggctagctacaacgattactgag

SEQ ID NO: 5195 - DNA, 31 bp, Artificial Sequence
  Description of Artificial Sequence:  Enzymatic Nucleic Acid
ggtcccaaggctagctacaacgactggattt

SEQ ID NO: 5196 - DNA, 31 bp, Artificial Sequence
  Description of Artificial Sequence:  Enzymatic Nucleic Acid
ggttgaggggctagctacaacgacccaatct

SEQ ID NO: 5197 - DNA, 31 bp, Artificial Sequence
  Description of Artificial Sequence:  Enzymatic Nucleic Acid
tgtgcgggggctagctacaacgatgaggtcc

SEQ ID NO: 5198 - DNA, 31 bp, Artificial Sequence
  Description of Artificial Sequence:  Enzymatic Nucleic Acid
gccagttgggctagctacaacgaccttgtgc

SEQ ID NO: 5199 - DNA, 31 bp, Artificial Sequence
  Description of Artificial Sequence:  Enzymatic Nucleic Acid
ccggccagggctagctacaacgatgtccttg

SEQ ID NO: 5200 - DNA, 31 bp, Artificial Sequence
  Description of Artificial Sequence:  Enzymatic Nucleic Acid
tgttggcgggctagctacaacgaccggccag

SEQ ID NO: 5201 - DNA, 31 bp, Artificial Sequence
  Description of Artificial Sequence:  Enzymatic Nucleic Acid
ccaccttgggctagctacaacgatggcgtcc

SEQ ID NO: 5202 - DNA, 31 bp, Artificial Sequence
  Description of Artificial Sequence:  Enzymatic Nucleic Acid
ggcccgaaggctagctacaacgagctcccac

SEQ ID NO: 5203 - DNA, 31 bp, Artificial Sequence
  Description of Artificial Sequence:  Enzymatic Nucleic Acid
gggaggggggctagctacaacgagaaccctg

SEQ ID NO: 5204 - DNA, 31 bp, Artificial Sequence
  Description of Artificial Sequence:  Enzymatic Nucleic Acid
gtcccccaggctagctacaacgaggggaggg

SEQ ID NO: 5205 - DNA, 31 bp, Artificial Sequence
  Description of Artificial Sequence:  Enzymatic Nucleic Acid
cccaacagggctagctacaacgacccccatg

SEQ ID NO: 5206 - DNA, 31 bp, Artificial Sequence
  Description of Artificial Sequence:  Enzymatic Nucleic Acid
cctgagcgggctagctacaacgagagggctc

SEQ ID NO: 5207 - DNA, 31 bp, Artificial Sequence
  Description of Artificial Sequence:  Enzymatic Nucleic Acid
gttgtgagggctagctacaacgaaggccctg

SEQ ID NO: 5208 - DNA, 31 bp, Artificial Sequence
  Description of Artificial Sequence:  Enzymatic Nucleic Acid
cacagttgggctagctacaacgagagtaggc

SEQ ID NO: 5209 - DNA, 31 bp, Artificial Sequence
  Description of Artificial Sequence:  Enzymatic Nucleic Acid
tggcacagggctagctacaacgatgtgagta

SEQ ID NO: 5210 - DNA, 31 bp, Artificial Sequence
  Description of Artificial Sequence:  Enzymatic Nucleic Acid
ccgattggggctagctacaacgaggaggcag

SEQ ID NO: 5211 - DNA, 31 bp, Artificial Sequence
  Description of Artificial Sequence:  Enzymatic Nucleic Acid
actgccgaggctagctacaacgatggtggag

SEQ ID NO: 5212 - DNA, 31 bp, Artificial Sequence
  Description of Artificial Sequence:  Enzymatic Nucleic Acid
taagggagggctagctacaacgaaggctgcc

SEQ ID NO: 5213 - DNA, 31 bp, Artificial Sequence
  Description of Artificial Sequence:  Enzymatic Nucleic Acid
ggtggagaggctagctacaacgaaagggagt

SEQ ID NO: 5214 - DNA, 31 bp, Artificial Sequence
  Description of Artificial Sequence:  Enzymatic Nucleic Acid
cttagaggggctagctacaacgaggagataa

SEQ ID NO: 5215 - DNA, 31 bp, Artificial Sequence
  Description of Artificial Sequence:  Enzymatic Nucleic Acid
gatgagtgggctagctacaacgacccttaga

SEQ ID NO: 5216 - DNA, 31 bp, Artificial Sequence
  Description of Artificial Sequence:  Enzymatic Nucleic Acid
aggatgagggctagctacaacgagtccctta

SEQ ID NO: 5217 - DNA, 31 bp, Artificial Sequence
  Description of Artificial Sequence:  Enzymatic Nucleic Acid
cctgaggaggctagctacaacgagagtgtcc

SEQ ID NO: 5218 - DNA, 31 bp, Artificial Sequence
  Description of Artificial Sequence:  Enzymatic Nucleic Acid
ccactgcaggctagctacaacgaggcctgag

SEQ ID NO: 5219 - RNA, 48 nt, Artificial Sequence
  Description of Artificial Sequence:  Enzymatic Nucleic Acid
gccaccagggaggaaacucccuucaaggacaucguccgggaggaaagu

SEQ ID NO: 5220 - RNA, 48 nt, Artificial Sequence
  Description of Artificial Sequence:  Enzymatic Nucleic Acid
gcagggcuggaggaaacucccuucaaggacaucguccgggacuguucc

SEQ ID NO: 5221 - RNA, 48 nt, Artificial Sequence
  Description of Artificial Sequence:  Enzymatic Nucleic Acid
auucugagggaggaaacucccuucaaggacaucguccgggagggcuca

SEQ ID NO: 5222 - RNA, 48 nt, Artificial Sequence
  Description of Artificial Sequence:  Enzymatic Nucleic Acid
cgauauggggaggaaacucccuucaaggacaucguccgggagagacag

SEQ ID NO: 5223 - RNA, 48 nt, Artificial Sequence
  Description of Artificial Sequence:  Enzymatic Nucleic Acid
ccagucuuggaggaaacucccuucaaggacaucguccggggauaagau

SEQ ID NO: 5224 - RNA, 48 nt, Artificial Sequence
  Description of Artificial Sequence:  Enzymatic Nucleic Acid
uccauguuggaggaaacucccuucaaggacaucguccggggguacagg

SEQ ID NO: 5225 - RNA, 48 nt, Artificial Sequence
  Description of Artificial Sequence:  Enzymatic Nucleic Acid
uccugaugggaggaaacucccuucaaggacaucguccggggauguucu

SEQ ID NO: 5226 - RNA, 48 nt, Artificial Sequence
  Description of Artificial Sequence:  Enzymatic Nucleic Acid
aacacgagggaggaaacucccuucaaggacaucguccgggaggggucc

SEQ ID NO: 5227 - RNA, 48 nt, Artificial Sequence
  Description of Artificial Sequence:  Enzymatic Nucleic Acid
auuuuuguggaggaaacucccuucaaggacaucguccgggaacaagaa

SEQ ID NO: 5228 - RNA, 48 nt, Artificial Sequence
  Description of Artificial Sequence:  Enzymatic Nucleic Acid
ugggacugggaggaaacucccuucaaggacaucguccggggaauuuug

SEQ ID NO: 5229 - RNA, 48 nt, Artificial Sequence
  Description of Artificial Sequence:  Enzymatic Nucleic Acid
acauccagggaggaaacucccuucaaggacaucguccggggauaacca

SEQ ID NO: 5230 - RNA, 48 nt, Artificial Sequence
  Description of Artificial Sequence:  Enzymatic Nucleic Acid
aaacgccgggaggaaacucccuucaaggacaucguccgggagacacau

SEQ ID NO: 5231 - RNA, 48 nt, Artificial Sequence
  Description of Artificial Sequence:  Enzymatic Nucleic Acid
gcaggaugggaggaaacucccuucaaggacaucguccgggagaggaag

SEQ ID NO: 5232 - RNA, 48 nt, Artificial Sequence
  Description of Artificial Sequence:  Enzymatic Nucleic Acid
cauagcagggaggaaacucccuucaaggacaucguccgggaggaugca

SEQ ID NO: 5233 - RNA, 48 nt, Artificial Sequence
  Description of Artificial Sequence:  Enzymatic Nucleic Acid
aggcauagggaggaaacucccuucaaggacaucguccgggagcaggau

SEQ ID NO: 5234 - RNA, 48 nt, Artificial Sequence
  Description of Artificial Sequence:  Enzymatic Nucleic Acid
agaugaggggaggaaacucccuucaaggacaucguccgggauagcagc

SEQ ID NO: 5235 - RNA, 48 nt, Artificial Sequence
  Description of Artificial Sequence:  Enzymatic Nucleic Acid
caaacgggggaggaaacucccuucaaggacaucguccgggaacauacc

SEQ ID NO: 5236 - RNA, 48 nt, Artificial Sequence
  Description of Artificial Sequence:  Enzymatic Nucleic Acid
agguuuugggaggaaacucccuucaaggacaucguccgggaugguccg

SEQ ID NO: 5237 - RNA, 48 nt, Artificial Sequence
  Description of Artificial Sequence:  Enzymatic Nucleic Acid
gaguugugggaggaaacucccuucaaggacaucguccgggagguuuug

SEQ ID NO: 5238 - RNA, 48 nt, Artificial Sequence
  Description of Artificial Sequence:  Enzymatic Nucleic Acid
uccuugagggaggaaacucccuucaaggacaucguccgggaggaguug

SEQ ID NO: 5239 - RNA, 48 nt, Artificial Sequence
  Description of Artificial Sequence:  Enzymatic Nucleic Acid
uuguacagggaggaaacucccuucaaggacaucguccgggaacaugag

SEQ ID NO: 5240 - RNA, 48 nt, Artificial Sequence
  Description of Artificial Sequence:  Enzymatic Nucleic Acid
uacaggugggaggaaacucccuucaaggacaucguccgggaguuuccg

SEQ ID NO: 5241 - RNA, 48 nt, Artificial Sequence
  Description of Artificial Sequence:  Enzymatic Nucleic Acid
guauuuugggaggaaacucccuucaaggacaucguccggggaaagccc

SEQ ID NO: 5242 - RNA, 48 nt, Artificial Sequence
  Description of Artificial Sequence:  Enzymatic Nucleic Acid
acaaauggggaggaaacucccuucaaggacaucguccgggacuaguaa

SEQ ID NO: 5243 - RNA, 48 nt, Artificial Sequence
  Description of Artificial Sequence:  Enzymatic Nucleic Acid
aaccacauggaggaaacucccuucaaggacaucguccgggauccauau

SEQ ID NO: 5244 - RNA, 48 nt, Artificial Sequence
  Description of Artificial Sequence:  Enzymatic Nucleic Acid
aagggacuggaggaaacucccuucaaggacaucguccgggaagauguu

SEQ ID NO: 5245 - RNA, 48 nt, Artificial Sequence
  Description of Artificial Sequence:  Enzymatic Nucleic Acid
aacagcggggaggaaacucccuucaaggacaucguccgggauaaaggg

SEQ ID NO: 5246 - RNA, 48 nt, Artificial Sequence
  Description of Artificial Sequence:  Enzymatic Nucleic Acid
gguaacagggaggaaacucccuucaaggacaucguccgggggcauaaa

SEQ ID NO: 5247 - RNA, 48 nt, Artificial Sequence
  Description of Artificial Sequence:  Enzymatic Nucleic Acid
uccuguggggaggaaacucccuucaaggacaucguccgggaaugugcc

SEQ ID NO: 5248 - RNA, 48 nt, Artificial Sequence
  Description of Artificial Sequence:  Enzymatic Nucleic Acid
uuuccaauggaggaaacucccuucaaggacaucguccgggaauaggcc

SEQ ID NO: 5249 - RNA, 48 nt, Artificial Sequence
  Description of Artificial Sequence:  Enzymatic Nucleic Acid
ccacaauuggaggaaacucccuucaaggacaucguccgggguugacau

SEQ ID NO: 5250 - RNA, 48 nt, Artificial Sequence
  Description of Artificial Sequence:  Enzymatic Nucleic Acid
aggggcggggaggaaacucccuucaaggacaucguccgggaaacccca

SEQ ID NO: 5251 - RNA, 48 nt, Artificial Sequence
  Description of Artificial Sequence:  Enzymatic Nucleic Acid
gaaaggggggaggaaacucccuucaaggacaucguccgggggcaaacc

SEQ ID NO: 5252 - RNA, 48 nt, Artificial Sequence
  Description of Artificial Sequence:  Enzymatic Nucleic Acid
ccacauugggaggaaacucccuucaaggacaucguccggggugaaagg

SEQ ID NO: 5253 - RNA, 48 nt, Artificial Sequence
  Description of Artificial Sequence:  Enzymatic Nucleic Acid
cauuaaagggaggaaacucccuucaaggacaucguccgggagaauauc

SEQ ID NO: 5254 - RNA, 48 nt, Artificial Sequence
  Description of Artificial Sequence:  Enzymatic Nucleic Acid
uauaaaggggaggaaacucccuucaaggacaucguccgggauuaaagc

SEQ ID NO: 5255 - RNA, 48 nt, Artificial Sequence
  Description of Artificial Sequence:  Enzymatic Nucleic Acid
uaugcaugggaggaaacucccuucaaggacaucguccgggauauaaag

SEQ ID NO: 5256 - RNA, 48 nt, Artificial Sequence
  Description of Artificial Sequence:  Enzymatic Nucleic Acid
cuuguaugggaggaaacucccuucaaggacaucguccgggaugcauau

SEQ ID NO: 5257 - RNA, 48 nt, Artificial Sequence
  Description of Artificial Sequence:  Enzymatic Nucleic Acid
uaaguuggggaggaaacucccuucaaggacaucguccggggagaaagu

SEQ ID NO: 5258 - RNA, 48 nt, Artificial Sequence
  Description of Artificial Sequence:  Enzymatic Nucleic Acid
uaaagguuggaggaaacucccuucaaggacaucguccgggacauacug

SEQ ID NO: 5259 - RNA, 48 nt, Artificial Sequence
  Description of Artificial Sequence:  Enzymatic Nucleic Acid
uugccgagggaggaaacucccuucaaggacaucguccgggaacggggu

SEQ ID NO: 5260 - RNA, 48 nt, Artificial Sequence
  Description of Artificial Sequence:  Enzymatic Nucleic Acid
acacuuggggaggaaacucccuucaaggacaucguccgggauagacca

SEQ ID NO: 5261 - RNA, 48 nt, Artificial Sequence
  Description of Artificial Sequence:  Enzymatic Nucleic Acid
ugcgucagggaggaaacucccuucaaggacaucguccgggaaacacuu

SEQ ID NO: 5262 - RNA, 48 nt, Artificial Sequence
  Description of Artificial Sequence:  Enzymatic Nucleic Acid
gguugcguggaggaaacucccuucaaggacaucguccgggagcaaaca

SEQ ID NO: 5263 - RNA, 48 nt, Artificial Sequence
  Description of Artificial Sequence:  Enzymatic Nucleic Acid
ggggguugggaggaaacucccuucaaggacaucguccggggucagcaa

SEQ ID NO: 5264 - RNA, 48 nt, Artificial Sequence
  Description of Artificial Sequence:  Enzymatic Nucleic Acid
cacgcaugggaggaaacucccuucaaggacaucguccggggcugaugg

SEQ ID NO: 5265 - RNA, 48 nt, Artificial Sequence
  Description of Artificial Sequence:  Enzymatic Nucleic Acid
guuccacgggaggaaacucccuucaaggacaucguccgggaugcgcug

SEQ ID NO: 5266 - RNA, 48 nt, Artificial Sequence
  Description of Artificial Sequence:  Enzymatic Nucleic Acid
uggaucggggaggaaacucccuucaaggacaucguccgggagaggaga

SEQ ID NO: 5267 - RNA, 48 nt, Artificial Sequence
  Description of Artificial Sequence:  Enzymatic Nucleic Acid
guauggauggaggaaacucccuucaaggacaucguccgggggcagagg

SEQ ID NO: 5268 - RNA, 48 nt, Artificial Sequence
  Description of Artificial Sequence:  Enzymatic Nucleic Acid
gaguuccgggaggaaacucccuucaaggacaucguccggggguaugga

SEQ ID NO: 5269 - RNA, 48 nt, Artificial Sequence
  Description of Artificial Sequence:  Enzymatic Nucleic Acid
aaaacaagggaggaaacucccuucaaggacaucguccgggggcuagga

SEQ ID NO: 5270 - RNA, 48 nt, Artificial Sequence
  Description of Artificial Sequence:  Enzymatic Nucleic Acid
gcugcgagggaggaaacucccuucaaggacaucguccgggaaaacaag

SEQ ID NO: 5271 - RNA, 48 nt, Artificial Sequence
  Description of Artificial Sequence:  Enzymatic Nucleic Acid
accugcugggaggaaacucccuucaaggacaucguccggggagcaaaa

SEQ ID NO: 5272 - RNA, 48 nt, Artificial Sequence
  Description of Artificial Sequence:  Enzymatic Nucleic Acid
agaauuguggaggaaacucccuucaaggacaucguccgggagucccga

SEQ ID NO: 5273 - RNA, 48 nt, Artificial Sequence
  Description of Artificial Sequence:  Enzymatic Nucleic Acid
cgggagagggaggaaacucccuucaaggacaucguccgggacgacaga

SEQ ID NO: 5274 - RNA, 48 nt, Artificial Sequence
  Description of Artificial Sequence:  Enzymatic Nucleic Acid
uauauuugggaggaaacucccuucaaggacaucguccggggggagagc

SEQ ID NO: 5275 - RNA, 48 nt, Artificial Sequence
  Description of Artificial Sequence:  Enzymatic Nucleic Acid
cagccuagggaggaaacucccuucaaggacaucguccgggagccaugg

SEQ ID NO: 5276 - RNA, 48 nt, Artificial Sequence
  Description of Artificial Sequence:  Enzymatic Nucleic Acid
guuggcagggaggaaacucccuucaaggacaucguccgggacagccua

SEQ ID NO: 5277 - RNA, 48 nt, Artificial Sequence
  Description of Artificial Sequence:  Enzymatic Nucleic Acid
ccaguuggggaggaaacucccuucaaggacaucguccgggagcacagc

SEQ ID NO: 5278 - RNA, 48 nt, Artificial Sequence
  Description of Artificial Sequence:  Enzymatic Nucleic Acid
acgucccgggaggaaacucccuucaaggacaucguccgggguaggauc

SEQ ID NO: 5279 - RNA, 48 nt, Artificial Sequence
  Description of Artificial Sequence:  Enzymatic Nucleic Acid
ggauucagggaggaaacucccuucaaggacaucguccggggccgacgg

SEQ ID NO: 5280 - RNA, 48 nt, Artificial Sequence
  Description of Artificial Sequence:  Enzymatic Nucleic Acid
gcgggauuggaggaaacucccuucaaggacaucguccgggagcgccga

SEQ ID NO: 5281 - RNA, 48 nt, Artificial Sequence
  Description of Artificial Sequence:  Enzymatic Nucleic Acid
gucguccgggaggaaacucccuucaaggacaucguccggggggauuca

SEQ ID NO: 5282 - RNA, 48 nt, Artificial Sequence
  Description of Artificial Sequence:  Enzymatic Nucleic Acid
ggagggguggaggaaacucccuucaaggacaucguccgggguccgcgg

SEQ ID NO: 5283 - RNA, 48 nt, Artificial Sequence
  Description of Artificial Sequence:  Enzymatic Nucleic Acid
gccccaagggaggaaacucccuucaaggacaucguccgggggccccgg

SEQ ID NO: 5284 - RNA, 48 nt, Artificial Sequence
  Description of Artificial Sequence:  Enzymatic Nucleic Acid
gaagcgggggaggaaacucccuucaaggacaucguccggggguagagc

SEQ ID NO: 5285 - RNA, 48 nt, Artificial Sequence
  Description of Artificial Sequence:  Enzymatic Nucleic Acid
cggagaagggaggaaacucccuucaaggacaucguccggggggcggua

SEQ ID NO: 5286 - RNA, 48 nt, Artificial Sequence
  Description of Artificial Sequence:  Enzymatic Nucleic Acid
acaauaggggaggaaacucccuucaaggacaucguccgggggagaagc

SEQ ID NO: 5287 - RNA, 48 nt, Artificial Sequence
  Description of Artificial Sequence:  Enzymatic Nucleic Acid
uggacgguggaggaaacucccuucaaggacaucguccggggguacaau

SEQ ID NO: 5288 - RNA, 48 nt, Artificial Sequence
  Description of Artificial Sequence:  Enzymatic Nucleic Acid
gagaggugggaggaaacucccuucaaggacaucguccggggccccgug

SEQ ID NO: 5289 - RNA, 48 nt, Artificial Sequence
  Description of Artificial Sequence:  Enzymatic Nucleic Acid
ggaguccgggaggaaacucccuucaaggacaucguccgggguaaagag

SEQ ID NO: 5290 - RNA, 48 nt, Artificial Sequence
  Description of Artificial Sequence:  Enzymatic Nucleic Acid
ugagaaggggaggaaacucccuucaaggacaucguccgggacagacgg

SEQ ID NO: 5291 - RNA, 48 nt, Artificial Sequence
  Description of Artificial Sequence:  Enzymatic Nucleic Acid
cgguccggggaggaaacucccuucaaggacaucguccgggagaugaga

SEQ ID NO: 5292 - RNA, 48 nt, Artificial Sequence
  Description of Artificial Sequence:  Enzymatic Nucleic Acid
gcgaagugggaggaaacucccuucaaggacaucguccgggacacgguc

SEQ ID NO: 5293 - RNA, 48 nt, Artificial Sequence
  Description of Artificial Sequence:  Enzymatic Nucleic Acid
aggugaagggaggaaacucccuucaaggacaucguccggggaagugca

SEQ ID NO: 5294 - RNA, 48 nt, Artificial Sequence
  Description of Artificial Sequence:  Enzymatic Nucleic Acid
gcgacgugggaggaaacucccuucaaggacaucguccgggagagguga

SEQ ID NO: 5295 - RNA, 48 nt, Artificial Sequence
  Description of Artificial Sequence:  Enzymatic Nucleic Acid
ucuccaugggaggaaacucccuucaaggacaucguccggggacgugca

SEQ ID NO: 5296 - RNA, 48 nt, Artificial Sequence
  Description of Artificial Sequence:  Enzymatic Nucleic Acid
ugggcguuggaggaaacucccuucaaggacaucguccgggacgguggu

SEQ ID NO: 5297 - RNA, 48 nt, Artificial Sequence
  Description of Artificial Sequence:  Enzymatic Nucleic Acid
ccugugggggaggaaacucccuucaaggacaucguccgggguucacgg

SEQ ID NO: 5298 - RNA, 48 nt, Artificial Sequence
  Description of Artificial Sequence:  Enzymatic Nucleic Acid
accuugggggaggaaacucccuucaaggacaucguccgggagguuccu

SEQ ID NO: 5299 - RNA, 48 nt, Artificial Sequence
  Description of Artificial Sequence:  Enzymatic Nucleic Acid
cucuuaugggaggaaacucccuucaaggacaucguccgggaagaccuu

SEQ ID NO: 5300 - RNA, 48 nt, Artificial Sequence
  Description of Artificial Sequence:  Enzymatic Nucleic Acid
aggucgguggaggaaacucccuucaaggacaucguccgggguugacau

SEQ ID NO: 5301 - RNA, 48 nt, Artificial Sequence
  Description of Artificial Sequence:  Enzymatic Nucleic Acid
cucaagguggaggaaacucccuucaaggacaucguccgggggucguug

SEQ ID NO: 5302 - RNA, 48 nt, Artificial Sequence
  Description of Artificial Sequence:  Enzymatic Nucleic Acid
guaugccuggaggaaacucccuucaaggacaucguccgggaaggucgg

SEQ ID NO: 5303 - RNA, 48 nt, Artificial Sequence
  Description of Artificial Sequence:  Enzymatic Nucleic Acid
cucccacuggaggaaacucccuucaaggacaucguccgggauuaaaca

SEQ ID NO: 5304 - RNA, 48 nt, Artificial Sequence
  Description of Artificial Sequence:  Enzymatic Nucleic Acid
aaaaguugggaggaaacucccuucaaggacaucguccgggauggugcu

SEQ ID NO: 5305 - RNA, 48 nt, Artificial Sequence
  Description of Artificial Sequence:  Enzymatic Nucleic Acid
ugauuaggggaggaaacucccuucaaggacaucguccgggagagguga

SEQ ID NO: 5306 - RNA, 48 nt, Artificial Sequence
  Description of Artificial Sequence:  Enzymatic Nucleic Acid
acccaaggggaggaaacucccuucaaggacaucguccgggacagcuug

SEQ ID NO: 5307 - RNA, 48 nt, Artificial Sequence
  Description of Artificial Sequence:  Enzymatic Nucleic Acid
auacggguggaggaaacucccuucaaggacaucguccgggaaugucca

SEQ ID NO: 5308 - RNA, 48 nt, Artificial Sequence
  Description of Artificial Sequence:  Enzymatic Nucleic Acid
ucagaaggggaggaaacucccuucaaggacaucguccgggaaaaaaga

SEQ ID NO: 5309 - RNA, 48 nt, Artificial Sequence
  Description of Artificial Sequence:  Enzymatic Nucleic Acid
aaagaaguggaggaaacucccuucaaggacaucguccgggagaaggca

SEQ ID NO: 5310 - RNA, 48 nt, Artificial Sequence
  Description of Artificial Sequence:  Enzymatic Nucleic Acid
ggagaucuggaggaaacucccuucaaggacaucguccggggaauagaa

SEQ ID NO: 5311 - RNA, 48 nt, Artificial Sequence
  Description of Artificial Sequence:  Enzymatic Nucleic Acid
ggcgguguggaggaaacucccuucaaggacaucguccggggaggagau

SEQ ID NO: 5312 - RNA, 48 nt, Artificial Sequence
  Description of Artificial Sequence:  Enzymatic Nucleic Acid
agcagaggggaggaaacucccuucaaggacaucguccgggggugucga

SEQ ID NO: 5313 - RNA, 48 nt, Artificial Sequence
  Description of Artificial Sequence:  Enzymatic Nucleic Acid
auacagagggaggaaacucccuucaaggacaucguccgggagaggcgg

SEQ ID NO: 5314 - RNA, 48 nt, Artificial Sequence
  Description of Artificial Sequence:  Enzymatic Nucleic Acid
caucaacuggaggaaacucccuucaaggacaucguccgggaccccaac

SEQ ID NO: 5315 - RNA, 48 nt, Artificial Sequence
  Description of Artificial Sequence:  Enzymatic Nucleic Acid
agauucauggaggaaacucccuucaaggacaucguccgggaacucacc

SEQ ID NO: 5316 - RNA, 48 nt, Artificial Sequence
  Description of Artificial Sequence:  Enzymatic Nucleic Acid
gcuagauuggaggaaacucccuucaaggacaucguccgggaucaacuc

SEQ ID NO: 5317 - RNA, 48 nt, Artificial Sequence
  Description of Artificial Sequence:  Enzymatic Nucleic Acid
caguuucuggaggaaacucccuucaaggacaucguccggggcccaaaa

SEQ ID NO: 5318 - RNA, 48 nt, Artificial Sequence
  Description of Artificial Sequence:  Enzymatic Nucleic Acid
caaauauuggaggaaacucccuucaaggacaucguccgggaagaacag

SEQ ID NO: 5319 - RNA, 48 nt, Artificial Sequence
  Description of Artificial Sequence:  Enzymatic Nucleic Acid
gaggagugggaggaaacucccuucaaggacaucguccggggaauccac

SEQ ID NO: 5320 - RNA, 48 nt, Artificial Sequence
  Description of Artificial Sequence:  Enzymatic Nucleic Acid
ucuauaugggaggaaacucccuucaaggacaucguccgggaggaggag

SEQ ID NO: 5321 - RNA, 48 nt, Artificial Sequence
  Description of Artificial Sequence:  Enzymatic Nucleic Acid
gauaggggggaggaaacucccuucaaggacaucguccgggauuuggug

SEQ ID NO: 5322 - RNA, 48 nt, Artificial Sequence
  Description of Artificial Sequence:  Enzymatic Nucleic Acid
ugccucuuggaggaaacucccuucaaggacaucguccggggucuaaca

SEQ ID NO: 5323 - RNA, 48 nt, Artificial Sequence
  Description of Artificial Sequence:  Enzymatic Nucleic Acid
cugcgaggggaggaaacucccuucaaggacaucguccggggagggagu

SEQ ID NO: 5324 - RNA, 48 nt, Artificial Sequence
  Description of Artificial Sequence:  Enzymatic Nucleic Acid
uucgucugggaggaaacucccuucaaggacaucguccggggaggcgag

SEQ ID NO: 5325 - RNA, 48 nt, Artificial Sequence
  Description of Artificial Sequence:  Enzymatic Nucleic Acid
gagaccuuggaggaaacucccuucaaggacaucguccggggucugcga

SEQ ID NO: 5326 - RNA, 48 nt, Artificial Sequence
  Description of Artificial Sequence:  Enzymatic Nucleic Acid
cgacgcggggaggaaacucccuucaaggacaucguccggggauugaga

SEQ ID NO: 5327 - RNA, 48 nt, Artificial Sequence
  Description of Artificial Sequence:  Enzymatic Nucleic Acid
cugcgacgggaggaaacucccuucaaggacaucguccgggggcgauug

SEQ ID NO: 5328 - RNA, 48 nt, Artificial Sequence
  Description of Artificial Sequence:  Enzymatic Nucleic Acid
aucuucugggaggaaacucccuucaaggacaucguccggggacgcggc

SEQ ID NO: 5329 - RNA, 48 nt, Artificial Sequence
  Description of Artificial Sequence:  Enzymatic Nucleic Acid
gauuaaagggaggaaacucccuucaaggacaucguccgggaagguacc

SEQ ID NO: 5330 - RNA, 48 nt, Artificial Sequence
  Description of Artificial Sequence:  Enzymatic Nucleic Acid
augaauguggaggaaacucccuucaaggacaucguccgggaggaaaag

SEQ ID NO: 5331 - RNA, 48 nt, Artificial Sequence
  Description of Artificial Sequence:  Enzymatic Nucleic Acid
uccuccugggaggaaacucccuucaaggacaucguccgggaaaugaau

SEQ ID NO: 5332 - RNA, 48 nt, Artificial Sequence
  Description of Artificial Sequence:  Enzymatic Nucleic Acid
acaucuauggaggaaacucccuucaaggacaucguccgggaacaaugu

SEQ ID NO: 5333 - RNA, 48 nt, Artificial Sequence
  Description of Artificial Sequence:  Enzymatic Nucleic Acid
ccuguuuuggaggaaacucccuucaaggacaucguccgggauuuacug

SEQ ID NO: 5334 - RNA, 48 nt, Artificial Sequence
  Description of Artificial Sequence:  Enzymatic Nucleic Acid
cuagcaggggaggaaacucccuucaaggacaucguccgggauaguuaa

SEQ ID NO: 5335 - RNA, 48 nt, Artificial Sequence
  Description of Artificial Sequence:  Enzymatic Nucleic Acid
aaaccuagggaggaaacucccuucaaggacaucguccgggaggcauag

SEQ ID NO: 5336 - RNA, 48 nt, Artificial Sequence
  Description of Artificial Sequence:  Enzymatic Nucleic Acid
ucuaagggggaggaaacucccuucaaggacaucguccgggaaauauuu

SEQ ID NO: 5337 - RNA, 48 nt, Artificial Sequence
  Description of Artificial Sequence:  Enzymatic Nucleic Acid
uaaugucgggaggaaacucccuucaaggacaucguccggggucuggaa

SEQ ID NO: 5338 - RNA, 48 nt, Artificial Sequence
  Description of Artificial Sequence:  Enzymatic Nucleic Acid
aauaauguggaggaaacucccuucaaggacaucguccggggcgucugg

SEQ ID NO: 5339 - RNA, 48 nt, Artificial Sequence
  Description of Artificial Sequence:  Enzymatic Nucleic Acid
aaaugaggggaggaaacucccuucaaggacaucguccggggcuacgug

SEQ ID NO: 5340 - RNA, 48 nt, Artificial Sequence
  Description of Artificial Sequence:  Enzymatic Nucleic Acid
gugacccgggaggaaacucccuucaaggacaucguccgggaaaaugag

SEQ ID NO: 5341 - RNA, 48 nt, Artificial Sequence
  Description of Artificial Sequence:  Enzymatic Nucleic Acid
ugccuuuuggaggaaacucccuucaaggacaucguccggggagguuug

SEQ ID NO: 5342 - RNA, 48 nt, Artificial Sequence
  Description of Artificial Sequence:  Enzymatic Nucleic Acid
cugaugauggaggaaacucccuucaaggacaucguccgggggggaaga

SEQ ID NO: 5343 - RNA, 48 nt, Artificial Sequence
  Description of Artificial Sequence:  Enzymatic Nucleic Acid
uuugaaugggaggaaacucccuucaaggacaucguccgggagggucca

SEQ ID NO: 5344 - RNA, 48 nt, Artificial Sequence
  Description of Artificial Sequence:  Enzymatic Nucleic Acid
uccuugugggaggaaacucccuucaaggacaucguccgggggguugag

SEQ ID NO: 5345 - RNA, 48 nt, Artificial Sequence
  Description of Artificial Sequence:  Enzymatic Nucleic Acid
cuuguuggggaggaaacucccuucaaggacaucguccgggguccggcc

SEQ ID NO: 5346 - RNA, 48 nt, Artificial Sequence
  Description of Artificial Sequence:  Enzymatic Nucleic Acid
gcccugagggaggaaacucccuucaaggacaucguccggggugagggc

SEQ ID NO: 5347 - RNA, 48 nt, Artificial Sequence
  Description of Artificial Sequence:  Enzymatic Nucleic Acid
gcugcuggggaggaaacucccuucaaggacaucguccgggacaguugu

SEQ ID NO: 5348 - RNA, 48 nt, Artificial Sequence
  Description of Artificial Sequence:  Enzymatic Nucleic Acid
gguggaggggaggaaacucccuucaaggacaucguccgggaggaggag

SEQ ID NO: 5349 - RNA, 48 nt, Artificial Sequence
  Description of Artificial Sequence:  Enzymatic Nucleic Acid
ggaaaguaggaggaaacucccuucaaggacaucguccgggagggcccu

SEQ ID NO: 5350 - RNA, 48 nt, Artificial Sequence
  Description of Artificial Sequence:  Enzymatic Nucleic Acid
ggcagagaggaggaaacucccuucaaggacaucguccgggaguauucu

SEQ ID NO: 5351 - RNA, 48 nt, Artificial Sequence
  Description of Artificial Sequence:  Enzymatic Nucleic Acid
guucgguaggaggaaacucccuucaaggacaucguccgggaggguccc

SEQ ID NO: 5352 - RNA, 48 nt, Artificial Sequence
  Description of Artificial Sequence:  Enzymatic Nucleic Acid
gccuguaaggaggaaacucccuucaaggacaucguccgggacgagcag

SEQ ID NO: 5353 - RNA, 48 nt, Artificial Sequence
  Description of Artificial Sequence:  Enzymatic Nucleic Acid
uuugucaaggaggaaacucccuucaaggacaucguccgggaagaaaaa

SEQ ID NO: 5354 - RNA, 48 nt, Artificial Sequence
  Description of Artificial Sequence:  Enzymatic Nucleic Acid
ccaagacaggaggaaacucccuucaaggacaucguccgggacgggugu

SEQ ID NO: 5355 - RNA, 48 nt, Artificial Sequence
  Description of Artificial Sequence:  Enzymatic Nucleic Acid
ggccaagaggaggaaacucccuucaaggacaucguccgggacacgggu

SEQ ID NO: 5356 - RNA, 48 nt, Artificial Sequence
  Description of Artificial Sequence:  Enzymatic Nucleic Acid
gaggacaaggaggaaacucccuucaaggacaucguccgggagguuggu

SEQ ID NO: 5357 - RNA, 48 nt, Artificial Sequence
  Description of Artificial Sequence:  Enzymatic Nucleic Acid
uuggaggaggaggaaacucccuucaaggacaucguccgggaacagguu

SEQ ID NO: 5358 - RNA, 48 nt, Artificial Sequence
  Description of Artificial Sequence:  Enzymatic Nucleic Acid
aaccaggaggaggaaacucccuucaaggacaucguccgggaaauugga

SEQ ID NO: 5359 - RNA, 48 nt, Artificial Sequence
  Description of Artificial Sequence:  Enzymatic Nucleic Acid
cgcagacaggaggaaacucccuucaaggacaucguccgggauccagcg

SEQ ID NO: 5360 - RNA, 48 nt, Artificial Sequence
  Description of Artificial Sequence:  Enzymatic Nucleic Acid
gccgcagaggaggaaacucccuucaaggacaucguccgggacauccag

SEQ ID NO: 5361 - RNA, 48 nt, Artificial Sequence
  Description of Artificial Sequence:  Enzymatic Nucleic Acid
agaaccaaggaggaaacucccuucaaggacaucguccgggaagaagau

SEQ ID NO: 5362 - RNA, 48 nt, Artificial Sequence
  Description of Artificial Sequence:  Enzymatic Nucleic Acid
acgggcaaggaggaaacucccuucaaggacaucguccgggauaccuug

SEQ ID NO: 5363 - RNA, 48 nt, Artificial Sequence
  Description of Artificial Sequence:  Enzymatic Nucleic Acid
uuagaggaggaggaaacucccuucaaggacaucguccgggaaacgggc

SEQ ID NO: 5364 - RNA, 48 nt, Artificial Sequence
  Description of Artificial Sequence:  Enzymatic Nucleic Acid
gagggaaaggaggaaacucccuucaaggacaucguccgggauagaggu

SEQ ID NO: 5365 - RNA, 48 nt, Artificial Sequence
  Description of Artificial Sequence:  Enzymatic Nucleic Acid
uacagcaaggaggaaacucccuucaaggacaucguccgggaugaggga

SEQ ID NO: 5366 - RNA, 48 nt, Artificial Sequence
  Description of Artificial Sequence:  Enzymatic Nucleic Acid
guuuuguaggaggaaacucccuucaaggacaucguccgggagcaacau

SEQ ID NO: 5367 - RNA, 48 nt, Artificial Sequence
  Description of Artificial Sequence:  Enzymatic Nucleic Acid
ugggaauaggaggaaacucccuucaaggacaucguccgggaggugcag

SEQ ID NO: 5368 - RNA, 48 nt, Artificial Sequence
  Description of Artificial Sequence:  Enzymatic Nucleic Acid
ccacugaaggaggaaacucccuucaaggacaucguccgggaaauggca

SEQ ID NO: 5369 - RNA, 48 nt, Artificial Sequence
  Description of Artificial Sequence:  Enzymatic Nucleic Acid
aagccagaggaggaaacucccuucaaggacaucguccgggaguggggg

SEQ ID NO: 5370 - RNA, 48 nt, Artificial Sequence
  Description of Artificial Sequence:  Enzymatic Nucleic Acid
caaaaccaggaggaaacucccuucaaggacaucguccgggaucaucca

SEQ ID NO: 5371 - RNA, 48 nt, Artificial Sequence
  Description of Artificial Sequence:  Enzymatic Nucleic Acid
auguuguaggaggaaacucccuucaaggacaucguccgggagacuugg

SEQ ID NO: 5372 - RNA, 48 nt, Artificial Sequence
  Description of Artificial Sequence:  Enzymatic Nucleic Acid
auugguaaggaggaaacucccuucaaggacaucguccgggagcggcau

SEQ ID NO: 5373 - RNA, 48 nt, Artificial Sequence
  Description of Artificial Sequence:  Enzymatic Nucleic Acid
cccaaagaggaggaaacucccuucaaggacaucguccgggaaaagaaa

SEQ ID NO: 5374 - RNA, 48 nt, Artificial Sequence
  Description of Artificial Sequence:  Enzymatic Nucleic Acid
cccaauuaggaggaaacucccuucaaggacaucguccgggauauccca

SEQ ID NO: 5375 - RNA, 48 nt, Artificial Sequence
  Description of Artificial Sequence:  Enzymatic Nucleic Acid
uuuuuguaggaggaaacucccuucaaggacaucguccgggaauauguu

SEQ ID NO: 5376 - RNA, 48 nt, Artificial Sequence
  Description of Artificial Sequence:  Enzymatic Nucleic Acid
cuaaaacaggaggaaacucccuucaaggacaucguccgggauuuugau

SEQ ID NO: 5377 - RNA, 48 nt, Artificial Sequence
  Description of Artificial Sequence:  Enzymatic Nucleic Acid
uccuaaaaggaggaaacucccuucaaggacaucguccgggacauuuug

SEQ ID NO: 5378 - RNA, 48 nt, Artificial Sequence
  Description of Artificial Sequence:  Enzymatic Nucleic Acid
ccuguuuaggaggaaacucccuucaaggacaucguccgggaggaaguu

SEQ ID NO: 5379 - RNA, 48 nt, Artificial Sequence
  Description of Artificial Sequence:  Enzymatic Nucleic Acid
uucguugaggaggaaacucccuucaaggacaucguccgggauacuuuc

SEQ ID NO: 5380 - RNA, 48 nt, Artificial Sequence
  Description of Artificial Sequence:  Enzymatic Nucleic Acid
aagacccaggaggaaacucccuucaaggacaucguccgggaauucguu

SEQ ID NO: 5381 - RNA, 48 nt, Artificial Sequence
  Description of Artificial Sequence:  Enzymatic Nucleic Acid
aauauccaggaggaaacucccuucaaggacaucguccgggauugcgug

SEQ ID NO: 5382 - RNA, 48 nt, Artificial Sequence
  Description of Artificial Sequence:  Enzymatic Nucleic Acid
aagguucaggaggaaacucccuucaaggacaucguccgggauacuguu

SEQ ID NO: 5383 - RNA, 48 nt, Artificial Sequence
  Description of Artificial Sequence:  Enzymatic Nucleic Acid
ucagcaaaggaggaaacucccuucaaggacaucguccgggacuuggca

SEQ ID NO: 5384 - RNA, 48 nt, Artificial Sequence
  Description of Artificial Sequence:  Enzymatic Nucleic Acid
aggagacaggaggaaacucccuucaaggacaucguccgggaaagguuc

SEQ ID NO: 5385 - RNA, 48 nt, Artificial Sequence
  Description of Artificial Sequence:  Enzymatic Nucleic Acid
agaggagaggaggaaacucccuucaaggacaucguccgggacaaaggu

SEQ ID NO: 5386 - RNA, 48 nt, Artificial Sequence
  Description of Artificial Sequence:  Enzymatic Nucleic Acid
gagcaaaaggaggaaacucccuucaaggacaucguccgggaagcggcu

SEQ ID NO: 5387 - RNA, 48 nt, Artificial Sequence
  Description of Artificial Sequence:  Enzymatic Nucleic Acid
gagcacgaggaggaaacucccuucaaggacaucguccgggagaauugu

SEQ ID NO: 5388 - RNA, 48 nt, Artificial Sequence
  Description of Artificial Sequence:  Enzymatic Nucleic Acid
uggcagcaggaggaaacucccuucaaggacaucguccgggagccuagc

SEQ ID NO: 5389 - RNA, 48 nt, Artificial Sequence
  Description of Artificial Sequence:  Enzymatic Nucleic Acid
gacguaaaggaggaaacucccuucaaggacaucguccgggaaaggacg

SEQ ID NO: 5390 - RNA, 48 nt, Artificial Sequence
  Description of Artificial Sequence:  Enzymatic Nucleic Acid
ggucgguaggaggaaacucccuucaaggacaucguccgggaauaggcg

SEQ ID NO: 5391 - RNA, 48 nt, Artificial Sequence
  Description of Artificial Sequence:  Enzymatic Nucleic Acid
agaaggcaggaggaaacucccuucaaggacaucguccgggagacgggg

SEQ ID NO: 5392 - RNA, 48 nt, Artificial Sequence
  Description of Artificial Sequence:  Enzymatic Nucleic Acid
gaagugcaggaggaaacucccuucaaggacaucguccgggacgguccg

SEQ ID NO: 5393 - RNA, 48 nt, Artificial Sequence
  Description of Artificial Sequence:  Enzymatic Nucleic Acid
gucguugaggaggaaacucccuucaaggacaucguccgggauugcuga

SEQ ID NO: 5394 - RNA, 48 nt, Artificial Sequence
  Description of Artificial Sequence:  Enzymatic Nucleic Acid
uaaacacaggaggaaacucccuucaaggacaucguccgggagucuuug

SEQ ID NO: 5395 - RNA, 48 nt, Artificial Sequence
  Description of Artificial Sequence:  Enzymatic Nucleic Acid
auuaaacaggaggaaacucccuucaaggacaucguccgggacagucuu

SEQ ID NO: 5396 - RNA, 48 nt, Artificial Sequence
  Description of Artificial Sequence:  Enzymatic Nucleic Acid
ucauuaaaggaggaaacucccuucaaggacaucguccgggacacaguc

SEQ ID NO: 5397 - RNA, 48 nt, Artificial Sequence
  Description of Artificial Sequence:  Enzymatic Nucleic Acid
uccuaguaggaggaaacucccuucaaggacaucguccgggaaagaccu

SEQ ID NO: 5398 - RNA, 48 nt, Artificial Sequence
  Description of Artificial Sequence:  Enzymatic Nucleic Acid
uaugccuaggaggaaacucccuucaaggacaucguccgggagccuccu

SEQ ID NO: 5399 - RNA, 48 nt, Artificial Sequence
  Description of Artificial Sequence:  Enzymatic Nucleic Acid
ggugaacaggaggaaacucccuucaaggacaucguccgggaccaauuu

SEQ ID NO: 5400 - RNA, 48 nt, Artificial Sequence
  Description of Artificial Sequence:  Enzymatic Nucleic Acid
cuggugaaggaggaaacucccuucaaggacaucguccgggacaccaau

SEQ ID NO: 5401 - RNA, 48 nt, Artificial Sequence
  Description of Artificial Sequence:  Enzymatic Nucleic Acid
gacaugaaggaggaaacucccuucaaggacaucguccgggaugagaug

SEQ ID NO: 5402 - RNA, 48 nt, Artificial Sequence
  Description of Artificial Sequence:  Enzymatic Nucleic Acid
caguaggaggaggaaacucccuucaaggacaucguccgggaugaacau

SEQ ID NO: 5403 - RNA, 48 nt, Artificial Sequence
  Description of Artificial Sequence:  Enzymatic Nucleic Acid
ggcuugaaggaggaaacucccuucaaggacaucguccgggaguaggac

SEQ ID NO: 5404 - RNA, 48 nt, Artificial Sequence
  Description of Artificial Sequence:  Enzymatic Nucleic Acid
ccaaggcaggaggaaacucccuucaaggacaucguccgggagcuugga

SEQ ID NO: 5405 - RNA, 48 nt, Artificial Sequence
  Description of Artificial Sequence:  Enzymatic Nucleic Acid
uaacuccaggaggaaacucccuucaaggacaucguccgggagaagcuc

SEQ ID NO: 5406 - RNA, 48 nt, Artificial Sequence
  Description of Artificial Sequence:  Enzymatic Nucleic Acid
ccccgauaggaggaaacucccuucaaggacaucguccgggagagcaga

SEQ ID NO: 5407 - RNA, 48 nt, Artificial Sequence
  Description of Artificial Sequence:  Enzymatic Nucleic Acid
gaggugaaggaggaaacucccuucaaggacaucguccgggaauguucc

SEQ ID NO: 5408 - RNA, 48 nt, Artificial Sequence
  Description of Artificial Sequence:  Enzymatic Nucleic Acid
ccccaacaggaggaaacucccuucaaggacaucguccgggagaauagc

SEQ ID NO: 5409 - RNA, 48 nt, Artificial Sequence
  Description of Artificial Sequence:  Enzymatic Nucleic Acid
caccccaaggaggaaacucccuucaaggacaucguccgggacagaaua

SEQ ID NO: 5410 - RNA, 48 nt, Artificial Sequence
  Description of Artificial Sequence:  Enzymatic Nucleic Acid
aacguugaggaggaaacucccuucaaggacaucguccgggauagcuga

SEQ ID NO: 5411 - RNA, 48 nt, Artificial Sequence
  Description of Artificial Sequence:  Enzymatic Nucleic Acid
ugaaaccaggaggaaacucccuucaaggacaucguccgggaauaguug

SEQ ID NO: 5412 - RNA, 48 nt, Artificial Sequence
  Description of Artificial Sequence:  Enzymatic Nucleic Acid
aaguaagaggaggaaacucccuucaaggacaucguccgggaggaaaug

SEQ ID NO: 5413 - RNA, 48 nt, Artificial Sequence
  Description of Artificial Sequence:  Enzymatic Nucleic Acid
uucaagaaggaggaaacucccuucaaggacaucguccgggaguuucuc

SEQ ID NO: 5414 - RNA, 48 nt, Artificial Sequence
  Description of Artificial Sequence:  Enzymatic Nucleic Acid
ccaaaagaggaggaaacucccuucaaggacaucguccgggaccaaaua

SEQ ID NO: 5415 - RNA, 48 nt, Artificial Sequence
  Description of Artificial Sequence:  Enzymatic Nucleic Acid
cgaauccaggaggaaacucccuucaaggacaucguccgggacuccaaa

SEQ ID NO: 5416 - RNA, 48 nt, Artificial Sequence
  Description of Artificial Sequence:  Enzymatic Nucleic Acid
ucuaacaaggaggaaacucccuucaaggacaucguccgggaguaguuu

SEQ ID NO: 5417 - RNA, 48 nt, Artificial Sequence
  Description of Artificial Sequence:  Enzymatic Nucleic Acid
ucgucuaaggaggaaacucccuucaaggacaucguccgggaacaguag

SEQ ID NO: 5418 - RNA, 48 nt, Artificial Sequence
  Description of Artificial Sequence:  Enzymatic Nucleic Acid
aauacuaaggaggaaacucccuucaaggacaucguccgggauugagau

SEQ ID NO: 5419 - RNA, 48 nt, Artificial Sequence
  Description of Artificial Sequence:  Enzymatic Nucleic Acid
ucuaucaaggaggaaacucccuucaaggacaucguccgggaauguccu

SEQ ID NO: 5420 - RNA, 48 nt, Artificial Sequence
  Description of Artificial Sequence:  Enzymatic Nucleic Acid
auugcuuaggaggaaacucccuucaaggacaucguccgggaucuauca

SEQ ID NO: 5421 - RNA, 48 nt, Artificial Sequence
  Description of Artificial Sequence:  Enzymatic Nucleic Acid
gggccccaggaggaaacucccuucaaggacaucguccgggaaauugcu

SEQ ID NO: 5422 - RNA, 48 nt, Artificial Sequence
  Description of Artificial Sequence:  Enzymatic Nucleic Acid
uuuaguaaggaggaaacucccuucaaggacaucguccgggauugggau

SEQ ID NO: 5423 - RNA, 48 nt, Artificial Sequence
  Description of Artificial Sequence:  Enzymatic Nucleic Acid
auuaacuaggaggaaacucccuucaaggacaucguccgggauacucug

SEQ ID NO: 5424 - RNA, 48 nt, Artificial Sequence
  Description of Artificial Sequence:  Enzymatic Nucleic Acid
auuggggaggaggaaacucccuucaaggacaucguccgggagaaagau

SEQ ID NO: 5425 - RNA, 48 nt, Artificial Sequence
  Description of Artificial Sequence:  Enzymatic Nucleic Acid
caccccaaggaggaaacucccuucaaggacaucguccgggaguccccc

SEQ ID NO: 5426 - RNA, 48 nt, Artificial Sequence
  Description of Artificial Sequence:  Enzymatic Nucleic Acid
ugcuggcaggaggaaacucccuucaaggacaucguccgggaguuguga

SEQ ID NO: 5427 - RNA, 48 nt, Artificial Sequence
  Description of Artificial Sequence:  Enzymatic Nucleic Acid
ggcccugaggaggaaacucccuucaaggacaucguccgggucugggau

SEQ ID NO: 5428 - RNA, 48 nt, Artificial Sequence
  Description of Artificial Sequence:  Enzymatic Nucleic Acid
guacagggggaggaaacucccuucaaggacaucguccgggccugacuc

SEQ ID NO: 5429 - RNA, 48 nt, Artificial Sequence
  Description of Artificial Sequence:  Enzymatic Nucleic Acid
uggagccaggaggaaacucccuucaaggacaucguccgggcagcagga

SEQ ID NO: 5430 - RNA, 48 nt, Artificial Sequence
  Description of Artificial Sequence:  Enzymatic Nucleic Acid
aacuggagggaggaaacucccuucaaggacaucguccgggcaccagca

SEQ ID NO: 5431 - RNA, 48 nt, Artificial Sequence
  Description of Artificial Sequence:  Enzymatic Nucleic Acid
uuccugaaggaggaaacucccuucaaggacaucguccggguggagcca

SEQ ID NO: 5432 - RNA, 48 nt, Artificial Sequence
  Description of Artificial Sequence:  Enzymatic Nucleic Acid
agggcucaggaggaaacucccuucaaggacaucguccggguguuccug

SEQ ID NO: 5433 - RNA, 48 nt, Artificial Sequence
  Description of Artificial Sequence:  Enzymatic Nucleic Acid
gagcagggggaggaaacucccuucaaggacaucguccgggucacuguu

SEQ ID NO: 5434 - RNA, 48 nt, Artificial Sequence
  Description of Artificial Sequence:  Enzymatic Nucleic Acid
aagauugaggaggaaacucccuucaaggacaucguccggggauauggc

SEQ ID NO: 5435 - RNA, 48 nt, Artificial Sequence
  Description of Artificial Sequence:  Enzymatic Nucleic Acid
cuguaacaggaggaaacucccuucaaggacaucguccggggagcaggg

SEQ ID NO: 5436 - RNA, 48 nt, Artificial Sequence
  Description of Artificial Sequence:  Enzymatic Nucleic Acid
aaaccccgggaggaaacucccuucaaggacaucguccgggcuguaaca

SEQ ID NO: 5437 - RNA, 48 nt, Artificial Sequence
  Description of Artificial Sequence:  Enzymatic Nucleic Acid
aagaaaaaggaggaaacucccuucaaggacaucguccgggcccgccug

SEQ ID NO: 5438 - RNA, 48 nt, Artificial Sequence
  Description of Artificial Sequence:  Enzymatic Nucleic Acid
agucuagaggaggaaacucccuucaaggacaucguccgggucuguggu

SEQ ID NO: 5439 - RNA, 48 nt, Artificial Sequence
  Description of Artificial Sequence:  Enzymatic Nucleic Acid
guccaccaggaggaaacucccuucaaggacaucguccggggagucuag

SEQ ID NO: 5440 - RNA, 48 nt, Artificial Sequence
  Description of Artificial Sequence:  Enzymatic Nucleic Acid
gaaguccaggaggaaacucccuucaaggacaucguccgggcacgaguc

SEQ ID NO: 5441 - RNA, 48 nt, Artificial Sequence
  Description of Artificial Sequence:  Enzymatic Nucleic Acid
aagacacaggaggaaacucccuucaaggacaucguccgggggguguuc

SEQ ID NO: 5442 - RNA, 48 nt, Artificial Sequence
  Description of Artificial Sequence:  Enzymatic Nucleic Acid
aauuuuggggaggaaacucccuucaaggacaucguccgggcaagacac

SEQ ID NO: 5443 - RNA, 48 nt, Artificial Sequence
  Description of Artificial Sequence:  Enzymatic Nucleic Acid
auuugggaggaggaaacucccuucaaggacaucguccgggugcgaauu

SEQ ID NO: 5444 - RNA, 48 nt, Artificial Sequence
  Description of Artificial Sequence:  Enzymatic Nucleic Acid
gugagugaggaggaaacucccuucaaggacaucguccggguggagauu

SEQ ID NO: 5445 - RNA, 48 nt, Artificial Sequence
  Description of Artificial Sequence:  Enzymatic Nucleic Acid
agcgauaaggaggaaacucccuucaaggacaucguccgggcaggacaa

SEQ ID NO: 5446 - RNA, 48 nt, Artificial Sequence
  Description of Artificial Sequence:  Enzymatic Nucleic Acid
auaaaacgggaggaaacucccuucaaggacaucguccgggcgcagaca

SEQ ID NO: 5447 - RNA, 48 nt, Artificial Sequence
  Description of Artificial Sequence:  Enzymatic Nucleic Acid
ugauaaaaggaggaaacucccuucaaggacaucguccggggccgcaga

SEQ ID NO: 5448 - RNA, 48 nt, Artificial Sequence
  Description of Artificial Sequence:  Enzymatic Nucleic Acid
cagaagaaggaggaaacucccuucaaggacaucguccgggcaacaaga

SEQ ID NO: 5449 - RNA, 48 nt, Artificial Sequence
  Description of Artificial Sequence:  Enzymatic Nucleic Acid
gcaacauaggaggaaacucccuucaaggacaucguccgggcuugauag

SEQ ID NO: 5450 - RNA, 48 nt, Artificial Sequence
  Description of Artificial Sequence:  Enzymatic Nucleic Acid
aggacaaaggaggaaacucccuucaaggacaucguccggggggcaaca

SEQ ID NO: 5451 - RNA, 48 nt, Artificial Sequence
  Description of Artificial Sequence:  Enzymatic Nucleic Acid
guccggugggaggaaacucccuucaaggacaucguccgggugguuguu

SEQ ID NO: 5452 - RNA, 48 nt, Artificial Sequence
  Description of Artificial Sequence:  Enzymatic Nucleic Acid
ugcgaaagggaggaaacucccuucaaggacaucguccgggccaagaug

SEQ ID NO: 5453 - RNA, 48 nt, Artificial Sequence
  Description of Artificial Sequence:  Enzymatic Nucleic Acid
gaggcccaggaggaaacucccuucaaggacaucguccgggucccauag

SEQ ID NO: 5454 - RNA, 48 nt, Artificial Sequence
  Description of Artificial Sequence:  Enzymatic Nucleic Acid
gacugaggggaggaaacucccuucaaggacaucguccgggccacuccc

SEQ ID NO: 5455 - RNA, 48 nt, Artificial Sequence
  Description of Artificial Sequence:  Enzymatic Nucleic Acid
gaaacggaggaggaaacucccuucaaggacaucguccgggugaggccc

SEQ ID NO: 5456 - RNA, 48 nt, Artificial Sequence
  Description of Artificial Sequence:  Enzymatic Nucleic Acid
aagagaaaggaggaaacucccuucaaggacaucguccgggggacugag

SEQ ID NO: 5457 - RNA, 48 nt, Artificial Sequence
  Description of Artificial Sequence:  Enzymatic Nucleic Acid
aaacugagggaggaaacucccuucaaggacaucguccgggcaagagaa

SEQ ID NO: 5458 - RNA, 48 nt, Artificial Sequence
  Description of Artificial Sequence:  Enzymatic Nucleic Acid
cuaguaaaggaggaaacucccuucaaggacaucguccgggugagccaa

SEQ ID NO: 5459 - RNA, 48 nt, Artificial Sequence
  Description of Artificial Sequence:  Enzymatic Nucleic Acid
aaauggcaggaggaaacucccuucaaggacaucguccggguaguaaac

SEQ ID NO: 5460 - RNA, 48 nt, Artificial Sequence
  Description of Artificial Sequence:  Enzymatic Nucleic Acid
acgaaccaggaggaaacucccuucaaggacaucguccgggugaacaaa

SEQ ID NO: 5461 - RNA, 48 nt, Artificial Sequence
  Description of Artificial Sequence:  Enzymatic Nucleic Acid
ccuacgaaggaggaaacucccuucaaggacaucguccgggcacugaac

SEQ ID NO: 5462 - RNA, 48 nt, Artificial Sequence
  Description of Artificial Sequence:  Enzymatic Nucleic Acid
aagcccuaggaggaaacucccuucaaggacaucguccggggaaccacu

SEQ ID NO: 5463 - RNA, 48 nt, Artificial Sequence
  Description of Artificial Sequence:  Enzymatic Nucleic Acid
ggggaaagggaggaaacucccuucaaggacaucguccgggccuacgaa

SEQ ID NO: 5464 - RNA, 48 nt, Artificial Sequence
  Description of Artificial Sequence:  Enzymatic Nucleic Acid
acugaaagggaggaaacucccuucaaggacaucguccgggcagacagu

SEQ ID NO: 5465 - RNA, 48 nt, Artificial Sequence
  Description of Artificial Sequence:  Enzymatic Nucleic Acid
ccauauaaggaggaaacucccuucaaggacaucguccgggugaaagcc

SEQ ID NO: 5466 - RNA, 48 nt, Artificial Sequence
  Description of Artificial Sequence:  Enzymatic Nucleic Acid
ccccaaaaggaggaaacucccuucaaggacaucguccgggcacaucau

SEQ ID NO: 5467 - RNA, 48 nt, Artificial Sequence
  Description of Artificial Sequence:  Enzymatic Nucleic Acid
agacuuggggaggaaacucccuucaaggacaucguccgggccccaaaa

SEQ ID NO: 5468 - RNA, 48 nt, Artificial Sequence
  Description of Artificial Sequence:  Enzymatic Nucleic Acid
uguacagaggaggaaacucccuucaaggacaucguccggguuggcccc

SEQ ID NO: 5469 - RNA, 48 nt, Artificial Sequence
  Description of Artificial Sequence:  Enzymatic Nucleic Acid
uaaagggaggaggaaacucccuucaaggacaucguccgggucaagaug

SEQ ID NO: 5470 - RNA, 48 nt, Artificial Sequence
  Description of Artificial Sequence:  Enzymatic Nucleic Acid
aauguauaggaggaaacucccuucaaggacaucguccgggccaaagac

SEQ ID NO: 5471 - RNA, 48 nt, Artificial Sequence
  Description of Artificial Sequence:  Enzymatic Nucleic Acid
ugccccaaggaggaaacucccuucaaggacaucguccgggucccaauu

SEQ ID NO: 5472 - RNA, 48 nt, Artificial Sequence
  Description of Artificial Sequence:  Enzymatic Nucleic Acid
gcaaugugggaggaaacucccuucaaggacaucguccgggcccaacuc

SEQ ID NO: 5473 - RNA, 48 nt, Artificial Sequence
  Description of Artificial Sequence:  Enzymatic Nucleic Acid
ucaauaggggaggaaacucccuucaaggacaucguccgggcuguuuac

SEQ ID NO: 5474 - RNA, 48 nt, Artificial Sequence
  Description of Artificial Sequence:  Enzymatic Nucleic Acid
uugacauaggaggaaacucccuucaaggacaucguccggguuuccaau

SEQ ID NO: 5475 - RNA, 48 nt, Artificial Sequence
  Description of Artificial Sequence:  Enzymatic Nucleic Acid
ccaaaagaggaggaaacucccuucaaggacaucguccgggccacaauu

SEQ ID NO: 5476 - RNA, 48 nt, Artificial Sequence
  Description of Artificial Sequence:  Enzymatic Nucleic Acid
gcggcaaaggaggaaacucccuucaaggacaucguccgggcccaaaag

SEQ ID NO: 5477 - RNA, 48 nt, Artificial Sequence
  Description of Artificial Sequence:  Enzymatic Nucleic Acid
cuguuuugggaggaaacucccuucaaggacaucguccggguuguaugc

SEQ ID NO: 5478 - RNA, 48 nt, Artificial Sequence
  Description of Artificial Sequence:  Enzymatic Nucleic Acid
aguaaaagggaggaaacucccuucaaggacaucguccgggcuguuuug

SEQ ID NO: 5479 - RNA, 48 nt, Artificial Sequence
  Description of Artificial Sequence:  Enzymatic Nucleic Acid
uagaaaggggaggaaacucccuucaaggacaucguccgggcuuguaag

SEQ ID NO: 5480 - RNA, 48 nt, Artificial Sequence
  Description of Artificial Sequence:  Enzymatic Nucleic Acid
acuguuuaggaggaaacucccuucaaggacaucguccggguuagaaag

SEQ ID NO: 5481 - RNA, 48 nt, Artificial Sequence
  Description of Artificial Sequence:  Enzymatic Nucleic Acid
uucacauaggaggaaacucccuucaaggacaucguccggguguuuacu

SEQ ID NO: 5482 - RNA, 48 nt, Artificial Sequence
  Description of Artificial Sequence:  Enzymatic Nucleic Acid
ccgagcaaggaggaaacucccuucaaggacaucguccggggggguaaa

SEQ ID NO: 5483 - RNA, 48 nt, Artificial Sequence
  Description of Artificial Sequence:  Enzymatic Nucleic Acid
ggccguugggaggaaacucccuucaaggacaucguccgggcgagcaac

SEQ ID NO: 5484 - RNA, 48 nt, Artificial Sequence
  Description of Artificial Sequence:  Enzymatic Nucleic Acid
agaccaggggaggaaacucccuucaaggacaucguccgggcguugccg

SEQ ID NO: 5485 - RNA, 48 nt, Artificial Sequence
  Description of Artificial Sequence:  Enzymatic Nucleic Acid
ggcauagaggaggaaacucccuucaaggacaucguccgggcaggccgu

SEQ ID NO: 5486 - RNA, 48 nt, Artificial Sequence
  Description of Artificial Sequence:  Enzymatic Nucleic Acid
agcaaacaggaggaaacucccuucaaggacaucguccggguuggcaua

SEQ ID NO: 5487 - RNA, 48 nt, Artificial Sequence
  Description of Artificial Sequence:  Enzymatic Nucleic Acid
agccccaaggaggaaacucccuucaaggacaucguccgggcagugggg

SEQ ID NO: 5488 - RNA, 48 nt, Artificial Sequence
  Description of Artificial Sequence:  Enzymatic Nucleic Acid
uggccaagggaggaaacucccuucaaggacaucguccgggcccaacca

SEQ ID NO: 5489 - RNA, 48 nt, Artificial Sequence
  Description of Artificial Sequence:  Enzymatic Nucleic Acid
gccuauggggaggaaacucccuucaaggacaucguccgggcaagcccc

SEQ ID NO: 5490 - RNA, 48 nt, Artificial Sequence
  Description of Artificial Sequence:  Enzymatic Nucleic Acid
gcugauggggaggaaacucccuucaaggacaucguccgggcuauggcc

SEQ ID NO: 5491 - RNA, 48 nt, Artificial Sequence
  Description of Artificial Sequence:  Enzymatic Nucleic Acid
cgcaugcgggaggaaacucccuucaaggacaucguccgggugauggcc

SEQ ID NO: 5492 - RNA, 48 nt, Artificial Sequence
  Description of Artificial Sequence:  Enzymatic Nucleic Acid
agguuccaggaggaaacucccuucaaggacaucguccggggcaugcgc

SEQ ID NO: 5493 - RNA, 48 nt, Artificial Sequence
  Description of Artificial Sequence:  Enzymatic Nucleic Acid
acaagcggggaggaaacucccuucaaggacaucguccggguaggaguu

SEQ ID NO: 5494 - RNA, 48 nt, Artificial Sequence
  Description of Artificial Sequence:  Enzymatic Nucleic Acid
cagaccugggaggaaacucccuucaaggacaucguccgggugcgagca

SEQ ID NO: 5495 - RNA, 48 nt, Artificial Sequence
  Description of Artificial Sequence:  Enzymatic Nucleic Acid
gccccagaggaggaaacucccuucaaggacaucguccgggcugcugcg

SEQ ID NO: 5496 - RNA, 48 nt, Artificial Sequence
  Description of Artificial Sequence:  Enzymatic Nucleic Acid
gaguuuugggaggaaacucccuucaaggacaucguccgggcccagacc

SEQ ID NO: 5497 - RNA, 48 nt, Artificial Sequence
  Description of Artificial Sequence:  Enzymatic Nucleic Acid
ggagagcaggaggaaacucccuucaaggacaucguccggggacagaau

SEQ ID NO: 5498 - RNA, 48 nt, Artificial Sequence
  Description of Artificial Sequence:  Enzymatic Nucleic Acid
ccuagcagggaggaaacucccuucaaggacaucguccgggcauggaaa

SEQ ID NO: 5499 - RNA, 48 nt, Artificial Sequence
  Description of Artificial Sequence:  Enzymatic Nucleic Acid
cagcacagggaggaaacucccuucaaggacaucguccgggcuagcagc

SEQ ID NO: 5500 - RNA, 48 nt, Artificial Sequence
  Description of Artificial Sequence:  Enzymatic Nucleic Acid
acaaaggaggaggaaacucccuucaaggacaucguccggggucccgcg

SEQ ID NO: 5501 - RNA, 48 nt, Artificial Sequence
  Description of Artificial Sequence:  Enzymatic Nucleic Acid
cgacgggaggaggaaacucccuucaaggacaucguccgggguaaacaa

SEQ ID NO: 5502 - RNA, 48 nt, Artificial Sequence
  Description of Artificial Sequence:  Enzymatic Nucleic Acid
agcgccgaggaggaaacucccuucaaggacaucguccggggggacgua

SEQ ID NO: 5503 - RNA, 48 nt, Artificial Sequence
  Description of Artificial Sequence:  Enzymatic Nucleic Acid
auucagcgggaggaaacucccuucaaggacaucguccgggcgacggga

SEQ ID NO: 5504 - RNA, 48 nt, Artificial Sequence
  Description of Artificial Sequence:  Enzymatic Nucleic Acid
ccaagcggggaggaaacucccuucaaggacaucguccgggcccgggag

SEQ ID NO: 5505 - RNA, 48 nt, Artificial Sequence
  Description of Artificial Sequence:  Enzymatic Nucleic Acid
cgguagagggaggaaacucccuucaaggacaucguccgggcccaagcg

SEQ ID NO: 5506 - RNA, 48 nt, Artificial Sequence
  Description of Artificial Sequence:  Enzymatic Nucleic Acid
cccguggaggaggaaacucccuucaaggacaucguccgggggucggua

SEQ ID NO: 5507 - RNA, 48 nt, Artificial Sequence
  Description of Artificial Sequence:  Enzymatic Nucleic Acid
gaggugcgggaggaaacucccuucaaggacaucguccgggcccgugga

SEQ ID NO: 5508 - RNA, 48 nt, Artificial Sequence
  Description of Artificial Sequence:  Enzymatic Nucleic Acid
ggcacagaggaggaaacucccuucaaggacaucguccgggggggaguc

SEQ ID NO: 5509 - RNA, 48 nt, Artificial Sequence
  Description of Artificial Sequence:  Enzymatic Nucleic Acid
agugcacaggaggaaacucccuucaaggacaucguccggggguccggc

SEQ ID NO: 5510 - RNA, 48 nt, Artificial Sequence
  Description of Artificial Sequence:  Enzymatic Nucleic Acid
ccaugcgaggaggaaacucccuucaaggacaucguccggggugcagag

SEQ ID NO: 5511 - RNA, 48 nt, Artificial Sequence
  Description of Artificial Sequence:  Enzymatic Nucleic Acid
ggcguucaggaggaaacucccuucaaggacaucguccggggguggucu

SEQ ID NO: 5512 - RNA, 48 nt, Artificial Sequence
  Description of Artificial Sequence:  Enzymatic Nucleic Acid
augcaagaggaggaaacucccuucaaggacaucguccgggcuugggca

SEQ ID NO: 5513 - RNA, 48 nt, Artificial Sequence
  Description of Artificial Sequence:  Enzymatic Nucleic Acid
ugacauugggaggaaacucccuucaaggacaucguccgggugaaaguc

SEQ ID NO: 5514 - RNA, 48 nt, Artificial Sequence
  Description of Artificial Sequence:  Enzymatic Nucleic Acid
gaaguaugggaggaaacucccuucaaggacaucguccgggcucaaggu

SEQ ID NO: 5515 - RNA, 48 nt, Artificial Sequence
  Description of Artificial Sequence:  Enzymatic Nucleic Acid
uccucccaggaggaaacucccuucaaggacaucguccgggucauuaaa

SEQ ID NO: 5516 - RNA, 48 nt, Artificial Sequence
  Description of Artificial Sequence:  Enzymatic Nucleic Acid
ucccccaaggaggaaacucccuucaaggacaucguccggguccuccca

SEQ ID NO: 5517 - RNA, 48 nt, Artificial Sequence
  Description of Artificial Sequence:  Enzymatic Nucleic Acid
uaaccuaaggaggaaacucccuucaaggacaucguccgggcuccuccc

SEQ ID NO: 5518 - RNA, 48 nt, Artificial Sequence
  Description of Artificial Sequence:  Enzymatic Nucleic Acid
accuuuaaggaggaaacucccuucaaggacaucguccgggcuaaccuc

SEQ ID NO: 5519 - RNA, 48 nt, Artificial Sequence
  Description of Artificial Sequence:  Enzymatic Nucleic Acid
uacaaagaggaggaaacucccuucaaggacaucguccgggcuuuaacc

SEQ ID NO: 5520 - RNA, 48 nt, Artificial Sequence
  Description of Artificial Sequence:  Enzymatic Nucleic Acid
gccuacagggaggaaacucccuucaaggacaucguccgggcuccuagu

SEQ ID NO: 5521 - RNA, 48 nt, Artificial Sequence
  Description of Artificial Sequence:  Enzymatic Nucleic Acid
aauuuaugggaggaaacucccuucaaggacaucguccgggcuacagcc

SEQ ID NO: 5522 - RNA, 48 nt, Artificial Sequence
  Description of Artificial Sequence:  Enzymatic Nucleic Acid
ugaacacaggaggaaacucccuucaaggacaucguccgggcaauuuau

SEQ ID NO: 5523 - RNA, 48 nt, Artificial Sequence
  Description of Artificial Sequence:  Enzymatic Nucleic Acid
gcauggugggaggaaacucccuucaaggacaucguccggguggugaac

SEQ ID NO: 5524 - RNA, 48 nt, Artificial Sequence
  Description of Artificial Sequence:  Enzymatic Nucleic Acid
cuuggaggggaggaaacucccuucaaggacaucguccggguugaacag

SEQ ID NO: 5525 - RNA, 48 nt, Artificial Sequence
  Description of Artificial Sequence:  Enzymatic Nucleic Acid
aggcacagggaggaaacucccuucaaggacaucguccggguuggaggc

SEQ ID NO: 5526 - RNA, 48 nt, Artificial Sequence
  Description of Artificial Sequence:  Enzymatic Nucleic Acid
caaagccaggaggaaacucccuucaaggacaucguccgggccaaggca

SEQ ID NO: 5527 - RNA, 48 nt, Artificial Sequence
  Description of Artificial Sequence:  Enzymatic Nucleic Acid
ccccaaagggaggaaacucccuucaaggacaucguccgggcacccaag

SEQ ID NO: 5528 - RNA, 48 nt, Artificial Sequence
  Description of Artificial Sequence:  Enzymatic Nucleic Acid
uguccaugggaggaaacucccuucaaggacaucguccgggcccaaagc

SEQ ID NO: 5529 - RNA, 48 nt, Artificial Sequence
  Description of Artificial Sequence:  Enzymatic Nucleic Acid
ucuuuauaggaggaaacucccuucaaggacaucguccggggggucaau

SEQ ID NO: 5530 - RNA, 48 nt, Artificial Sequence
  Description of Artificial Sequence:  Enzymatic Nucleic Acid
cacagaagggaggaaacucccuucaaggacaucguccggguccaaauu

SEQ ID NO: 5531 - RNA, 48 nt, Artificial Sequence
  Description of Artificial Sequence:  Enzymatic Nucleic Acid
gagaguaaggaggaaacucccuucaaggacaucguccggguccacaga

SEQ ID NO: 5532 - RNA, 48 nt, Artificial Sequence
  Description of Artificial Sequence:  Enzymatic Nucleic Acid
cucuaaggggaggaaacucccuucaaggacaucguccgggcccccgau

SEQ ID NO: 5533 - RNA, 48 nt, Artificial Sequence
  Description of Artificial Sequence:  Enzymatic Nucleic Acid
uccggagaggaggaaacucccuucaaggacaucguccgggucuaaggc

SEQ ID NO: 5534 - RNA, 48 nt, Artificial Sequence
  Description of Artificial Sequence:  Enzymatic Nucleic Acid
ccugagugggaggaaacucccuucaaggacaucguccgggcguauggu

SEQ ID NO: 5535 - RNA, 48 nt, Artificial Sequence
  Description of Artificial Sequence:  Enzymatic Nucleic Acid
auagcuugggaggaaacucccuucaaggacaucguccgggcugagugc

SEQ ID NO: 5536 - RNA, 48 nt, Artificial Sequence
  Description of Artificial Sequence:  Enzymatic Nucleic Acid
cagaauagggaggaaacucccuucaaggacaucguccggguugccuga

SEQ ID NO: 5537 - RNA, 48 nt, Artificial Sequence
  Description of Artificial Sequence:  Enzymatic Nucleic Acid
ucaacucaggaggaaacucccuucaaggacaucguccgggcccaacac

SEQ ID NO: 5538 - RNA, 48 nt, Artificial Sequence
  Description of Artificial Sequence:  Enzymatic Nucleic Acid
uucaucaaggaggaaacucccuucaaggacaucguccgggucacccca

SEQ ID NO: 5539 - RNA, 48 nt, Artificial Sequence
  Description of Artificial Sequence:  Enzymatic Nucleic Acid
ccagguggggaggaaacucccuucaaggacaucguccggguagauuca

SEQ ID NO: 5540 - RNA, 48 nt, Artificial Sequence
  Description of Artificial Sequence:  Enzymatic Nucleic Acid
acuucccaggaggaaacucccuucaaggacaucguccgggccaggugg

SEQ ID NO: 5541 - RNA, 48 nt, Artificial Sequence
  Description of Artificial Sequence:  Enzymatic Nucleic Acid
ccaaauuaggaggaaacucccuucaaggacaucguccggguucccacc

SEQ ID NO: 5542 - RNA, 48 nt, Artificial Sequence
  Description of Artificial Sequence:  Enzymatic Nucleic Acid
ccuggaugggaggaaacucccuucaaggacaucguccggguggaucuu

SEQ ID NO: 5543 - RNA, 48 nt, Artificial Sequence
  Description of Artificial Sequence:  Enzymatic Nucleic Acid
gcugacuaggaggaaacucccuucaaggacaucguccggguaauuccc

SEQ ID NO: 5544 - RNA, 48 nt, Artificial Sequence
  Description of Artificial Sequence:  Enzymatic Nucleic Acid
auagcugaggaggaaacucccuucaaggacaucguccggguacuaauu

SEQ ID NO: 5545 - RNA, 48 nt, Artificial Sequence
  Description of Artificial Sequence:  Enzymatic Nucleic Acid
ugacauagggaggaaacucccuucaaggacaucguccgggugacuacu

SEQ ID NO: 5546 - RNA, 48 nt, Artificial Sequence
  Description of Artificial Sequence:  Enzymatic Nucleic Acid
cauauuaaggaggaaacucccuucaaggacaucguccgggguugacau

SEQ ID NO: 5547 - RNA, 48 nt, Artificial Sequence
  Description of Artificial Sequence:  Enzymatic Nucleic Acid
uuuuuaggggaggaaacucccuucaaggacaucguccgggccauauua

SEQ ID NO: 5548 - RNA, 48 nt, Artificial Sequence
  Description of Artificial Sequence:  Enzymatic Nucleic Acid
augugaaaggaggaaacucccuucaaggacaucguccgggcacaauag

SEQ ID NO: 5549 - RNA, 48 nt, Artificial Sequence
  Description of Artificial Sequence:  Enzymatic Nucleic Acid
guuucucgggaggaaacucccuucaaggacaucguccgggccaaaagu

SEQ ID NO: 5550 - RNA, 48 nt, Artificial Sequence
  Description of Artificial Sequence:  Enzymatic Nucleic Acid
aaaagacaggaggaaacucccuucaaggacaucguccgggcaaauauu

SEQ ID NO: 5551 - RNA, 48 nt, Artificial Sequence
  Description of Artificial Sequence:  Enzymatic Nucleic Acid
aauccacaggaggaaacucccuucaaggacaucguccggguccaaaag

SEQ ID NO: 5552 - RNA, 48 nt, Artificial Sequence
  Description of Artificial Sequence:  Enzymatic Nucleic Acid
gggaccugggaggaaacucccuucaaggacaucguccgggcucuucgu

SEQ ID NO: 5553 - RNA, 48 nt, Artificial Sequence
  Description of Artificial Sequence:  Enzymatic Nucleic Acid
cuaggggaggaggaaacucccuucaaggacaucguccgggcugccucu

SEQ ID NO: 5554 - RNA, 48 nt, Artificial Sequence
  Description of Artificial Sequence:  Enzymatic Nucleic Acid
gauugagaggaggaaacucccuucaaggacaucguccgggcuucgucu

SEQ ID NO: 5555 - RNA, 48 nt, Artificial Sequence
  Description of Artificial Sequence:  Enzymatic Nucleic Acid
uucugcgaggaggaaacucccuucaaggacaucguccggggcggcgau

SEQ ID NO: 5556 - RNA, 48 nt, Artificial Sequence
  Description of Artificial Sequence:  Enzymatic Nucleic Acid
aaggaauaggaggaaacucccuucaaggacaucguccggguaacauug

SEQ ID NO: 5557 - RNA, 48 nt, Artificial Sequence
  Description of Artificial Sequence:  Enzymatic Nucleic Acid
guuucccaggaggaaacucccuucaaggacaucguccgggcuuaugug

SEQ ID NO: 5558 - RNA, 48 nt, Artificial Sequence
  Description of Artificial Sequence:  Enzymatic Nucleic Acid
gaauaaagggaggaaacucccuucaaggacaucguccgggcccguaaa

SEQ ID NO: 5559 - RNA, 48 nt, Artificial Sequence
  Description of Artificial Sequence:  Enzymatic Nucleic Acid
gcaagguaggaggaaacucccuucaaggacaucguccgggcguagaag

SEQ ID NO: 5560 - RNA, 48 nt, Artificial Sequence
  Description of Artificial Sequence:  Enzymatic Nucleic Acid
ggaguuugggaggaaacucccuucaaggacaucguccgggcauuuagg

SEQ ID NO: 5561 - RNA, 48 nt, Artificial Sequence
  Description of Artificial Sequence:  Enzymatic Nucleic Acid
acaaauugggaggaaacucccuucaaggacaucguccggguuacaucu

SEQ ID NO: 5562 - RNA, 48 nt, Artificial Sequence
  Description of Artificial Sequence:  Enzymatic Nucleic Acid
guaaggggggaggaaacucccuucaaggacaucguccgggcccacaaa

SEQ ID NO: 5563 - RNA, 48 nt, Artificial Sequence
  Description of Artificial Sequence:  Enzymatic Nucleic Acid
uucauuuaggaggaaacucccuucaaggacaucguccggguguaaggg

SEQ ID NO: 5564 - RNA, 48 nt, Artificial Sequence
  Description of Artificial Sequence:  Enzymatic Nucleic Acid
ggauaaaaggaggaaacucccuucaaggacaucguccgggcuagcagg

SEQ ID NO: 5565 - RNA, 48 nt, Artificial Sequence
  Description of Artificial Sequence:  Enzymatic Nucleic Acid
ggauaauaggaggaaacucccuucaaggacaucguccggggguuugau

SEQ ID NO: 5566 - RNA, 48 nt, Artificial Sequence
  Description of Artificial Sequence:  Enzymatic Nucleic Acid
acuacauaggaggaaacucccuucaaggacaucguccgggucuggaua

SEQ ID NO: 5567 - RNA, 48 nt, Artificial Sequence
  Description of Artificial Sequence:  Enzymatic Nucleic Acid
augauuaaggaggaaacucccuucaaggacaucguccggguacauacu

SEQ ID NO: 5568 - RNA, 48 nt, Artificial Sequence
  Description of Artificial Sequence:  Enzymatic Nucleic Acid
gauccccgggaggaaacucccuucaaggacaucguccgggcuuccaaa

SEQ ID NO: 5569 - RNA, 48 nt, Artificial Sequence
  Description of Artificial Sequence:  Enzymatic Nucleic Acid
cguguggaggaggaaacucccuucaaggacaucguccgggucucuuuu

SEQ ID NO: 5570 - RNA, 48 nt, Artificial Sequence
  Description of Artificial Sequence:  Enzymatic Nucleic Acid
aggcgcuaggaggaaacucccuucaaggacaucguccgggguguggac

SEQ ID NO: 5571 - RNA, 48 nt, Artificial Sequence
  Description of Artificial Sequence:  Enzymatic Nucleic Acid
augaggcgggaggaaacucccuucaaggacaucguccggguacgugug

SEQ ID NO: 5572 - RNA, 48 nt, Artificial Sequence
  Description of Artificial Sequence:  Enzymatic Nucleic Acid
uauggugaggaggaaacucccuucaaggacaucguccgggccgcaaaa

SEQ ID NO: 5573 - RNA, 48 nt, Artificial Sequence
  Description of Artificial Sequence:  Enzymatic Nucleic Acid
cucccaugggaggaaacucccuucaaggacaucguccggguguagauc

SEQ ID NO: 5574 - RNA, 48 nt, Artificial Sequence
  Description of Artificial Sequence:  Enzymatic Nucleic Acid
aagaccaaggaggaaacucccuucaaggacaucguccgggcucccaug

SEQ ID NO: 5575 - RNA, 48 nt, Artificial Sequence
  Description of Artificial Sequence:  Enzymatic Nucleic Acid
uuggaagaggaggaaacucccuucaaggacaucguccgggcaaccucc

SEQ ID NO: 5576 - RNA, 48 nt, Artificial Sequence
  Description of Artificial Sequence:  Enzymatic Nucleic Acid
uccccaugggaggaaacucccuucaaggacaucguccgggcuuuucga

SEQ ID NO: 5577 - RNA, 48 nt, Artificial Sequence
  Description of Artificial Sequence:  Enzymatic Nucleic Acid
ggguccaaggaggaaacucccuucaaggacaucguccgggugaugauc

SEQ ID NO: 5578 - RNA, 48 nt, Artificial Sequence
  Description of Artificial Sequence:  Enzymatic Nucleic Acid
ugaguuggggaggaaacucccuucaaggacaucguccggguuugaaug

SEQ ID NO: 5579 - RNA, 48 nt, Artificial Sequence
  Description of Artificial Sequence:  Enzymatic Nucleic Acid
uggauuuaggaggaaacucccuucaaggacaucguccgggugaguugg

SEQ ID NO: 5580 - RNA, 48 nt, Artificial Sequence
  Description of Artificial Sequence:  Enzymatic Nucleic Acid
gcguccggggaggaaacucccuucaaggacaucguccgggcaguuguc

SEQ ID NO: 5581 - RNA, 48 nt, Artificial Sequence
  Description of Artificial Sequence:  Enzymatic Nucleic Acid
cacucccaggaggaaacucccuucaaggacaucguccgggcuuguugg

SEQ ID NO: 5582 - RNA, 48 nt, Artificial Sequence
  Description of Artificial Sequence:  Enzymatic Nucleic Acid
ugcucccaggaggaaacucccuucaaggacaucguccgggucccaccu

SEQ ID NO: 5583 - RNA, 48 nt, Artificial Sequence
  Description of Artificial Sequence:  Enzymatic Nucleic Acid
cccgaaugggaggaaacucccuucaaggacaucguccgggucccacuc

SEQ ID NO: 5584 - RNA, 48 nt, Artificial Sequence
  Description of Artificial Sequence:  Enzymatic Nucleic Acid
aacccuggggaggaaacucccuucaaggacaucguccgggccgaaugc

SEQ ID NO: 5585 - RNA, 48 nt, Artificial Sequence
  Description of Artificial Sequence:  Enzymatic Nucleic Acid
ggggugaaggaggaaacucccuucaaggacaucguccgggccuggccc

SEQ ID NO: 5586 - RNA, 48 nt, Artificial Sequence
  Description of Artificial Sequence:  Enzymatic Nucleic Acid
gggcuccaggaggaaacucccuucaaggacaucguccgggcccaacag

SEQ ID NO: 5587 - RNA, 48 nt, Artificial Sequence
  Description of Artificial Sequence:  Enzymatic Nucleic Acid
cgugagggggaggaaacucccuucaaggacaucguccggguccacccc

SEQ ID NO: 5588 - RNA, 48 nt, Artificial Sequence
  Description of Artificial Sequence:  Enzymatic Nucleic Acid
ugaguaggggaggaaacucccuucaaggacaucguccgggccugagcg

SEQ ID NO: 5589 - RNA, 48 nt, Artificial Sequence
  Description of Artificial Sequence:  Enzymatic Nucleic Acid
aggagcugggaggaaacucccuucaaggacaucguccggguggcacag

SEQ ID NO: 5590 - RNA, 48 nt, Artificial Sequence
  Description of Artificial Sequence:  Enzymatic Nucleic Acid
aggaggagggaggaaacucccuucaaggacaucguccgggugcuggca

SEQ ID NO: 5591 - RNA, 48 nt, Artificial Sequence
  Description of Artificial Sequence:  Enzymatic Nucleic Acid
ccugacugggaggaaacucccuucaaggacaucguccgggcgauuggu

SEQ ID NO: 5592 - RNA, 48 nt, Artificial Sequence
  Description of Artificial Sequence:  Enzymatic Nucleic Acid
cuuccugaggaggaaacucccuucaaggacaucguccgggugccgauu

SEQ ID NO: 5593 - RNA, 48 nt, Artificial Sequence
  Description of Artificial Sequence:  Enzymatic Nucleic Acid
guaggcugggaggaaacucccuucaaggacaucguccgggcuuccuga

SEQ ID NO: 5594 - RNA, 48 nt, Artificial Sequence
  Description of Artificial Sequence:  Enzymatic Nucleic Acid
ggaguaggggaggaaacucccuucaaggacaucguccgggugccuucc

SEQ ID NO: 5595 - RNA, 48 nt, Artificial Sequence
  Description of Artificial Sequence:  Enzymatic Nucleic Acid
cugcauggggaggaaacucccuucaaggacaucguccgggcugaggau

SEQ ID NO: 5596 - RNA, 48 nt, Artificial Sequence
  Description of Artificial Sequence:  Enzymatic Nucleic Acid
ucugggauggaggaaacucccuucaaggacaucguccggguugaagag

SEQ ID NO: 5597 - RNA, 48 nt, Artificial Sequence
  Description of Artificial Sequence:  Enzymatic Nucleic Acid
cccugacuggaggaaacucccuucaaggacaucguccgggugggaucu

SEQ ID NO: 5598 - RNA, 48 nt, Artificial Sequence
  Description of Artificial Sequence:  Enzymatic Nucleic Acid
acagggccggaggaaacucccuucaaggacaucguccgggugacucug

SEQ ID NO: 5599 - RNA, 48 nt, Artificial Sequence
  Description of Artificial Sequence:  Enzymatic Nucleic Acid
uacagggcggaggaaacucccuucaaggacaucguccgggcugacucu

SEQ ID NO: 5600 - RNA, 48 nt, Artificial Sequence
  Description of Artificial Sequence:  Enzymatic Nucleic Acid
ggagccacggaggaaacucccuucaaggacaucguccgggagcaggaa

SEQ ID NO: 5601 - RNA, 48 nt, Artificial Sequence
  Description of Artificial Sequence:  Enzymatic Nucleic Acid
acuggagcggaggaaacucccuucaaggacaucguccgggaccagcag

SEQ ID NO: 5602 - RNA, 48 nt, Artificial Sequence
  Description of Artificial Sequence:  Enzymatic Nucleic Acid
cacuguucggaggaaacucccuucaaggacaucguccgggugaacugg

SEQ ID NO: 5603 - RNA, 48 nt, Artificial Sequence
  Description of Artificial Sequence:  Enzymatic Nucleic Acid
ucacuguuggaggaaacucccuucaaggacaucguccgggcugaacug

SEQ ID NO: 5604 - RNA, 48 nt, Artificial Sequence
  Description of Artificial Sequence:  Enzymatic Nucleic Acid
acaguauuggaggaaacucccuucaaggacaucguccgggugagcagg

SEQ ID NO: 5605 - RNA, 48 nt, Artificial Sequence
  Description of Artificial Sequence:  Enzymatic Nucleic Acid
uccccaguggaggaaacucccuucaaggacaucguccggguucgauaa

SEQ ID NO: 5606 - RNA, 48 nt, Artificial Sequence
  Description of Artificial Sequence:  Enzymatic Nucleic Acid
agggucccggaggaaacucccuucaaggacaucguccgggagucuucg

SEQ ID NO: 5607 - RNA, 48 nt, Artificial Sequence
  Description of Artificial Sequence:  Enzymatic Nucleic Acid
caggguccggaggaaacucccuucaaggacaucguccgggcagucuuc

SEQ ID NO: 5608 - RNA, 48 nt, Artificial Sequence
  Description of Artificial Sequence:  Enzymatic Nucleic Acid
acagggucggaggaaacucccuucaaggacaucguccgggccagucuu

SEQ ID NO: 5609 - RNA, 48 nt, Artificial Sequence
  Description of Artificial Sequence:  Enzymatic Nucleic Acid
uacaggguggaggaaacucccuucaaggacaucguccgggcccagucu

SEQ ID NO: 5610 - RNA, 48 nt, Artificial Sequence
  Description of Artificial Sequence:  Enzymatic Nucleic Acid
auguucucggaggaaacucccuucaaggacaucguccgggauguucgg

SEQ ID NO: 5611 - RNA, 48 nt, Artificial Sequence
  Description of Artificial Sequence:  Enzymatic Nucleic Acid
gauguucuggaggaaacucccuucaaggacaucguccgggcauguucg

SEQ ID NO: 5612 - RNA, 48 nt, Artificial Sequence
  Description of Artificial Sequence:  Enzymatic Nucleic Acid
gcgauguuggaggaaacucccuucaaggacaucguccggguccauguu

SEQ ID NO: 5613 - RNA, 48 nt, Artificial Sequence
  Description of Artificial Sequence:  Enzymatic Nucleic Acid
uaggagucggaggaaacucccuucaaggacaucguccgggugaugcga

SEQ ID NO: 5614 - RNA, 48 nt, Artificial Sequence
  Description of Artificial Sequence:  Enzymatic Nucleic Acid
cuaggaguggaggaaacucccuucaaggacaucguccgggcugaugcg

SEQ ID NO: 5615 - RNA, 48 nt, Artificial Sequence
  Description of Artificial Sequence:  Enzymatic Nucleic Acid
caggggucggaggaaacucccuucaaggacaucguccggguaggaguc

SEQ ID NO: 5616 - RNA, 48 nt, Artificial Sequence
  Description of Artificial Sequence:  Enzymatic Nucleic Acid
gcagggguggaggaaacucccuucaaggacaucguccgggcuaggagu

SEQ ID NO: 5617 - RNA, 48 nt, Artificial Sequence
  Description of Artificial Sequence:  Enzymatic Nucleic Acid
aaccccgcggaggaaacucccuucaaggacaucguccggguguaacac

SEQ ID NO: 5618 - RNA, 48 nt, Artificial Sequence
  Description of Artificial Sequence:  Enzymatic Nucleic Acid
aaaaacccggaggaaacucccuucaaggacaucguccggggccuguaa

SEQ ID NO: 5619 - RNA, 48 nt, Artificial Sequence
  Description of Artificial Sequence:  Enzymatic Nucleic Acid
gaaaaaccggaggaaacucccuucaaggacaucguccgggcgccugua

SEQ ID NO: 5620 - RNA, 48 nt, Artificial Sequence
  Description of Artificial Sequence:  Enzymatic Nucleic Acid
agaaaaacggaggaaacucccuucaaggacaucguccgggccgccugu

SEQ ID NO: 5621 - RNA, 48 nt, Artificial Sequence
  Description of Artificial Sequence:  Enzymatic Nucleic Acid
ucuagacuggaggaaacucccuucaaggacaucguccgggugugguau

SEQ ID NO: 5622 - RNA, 48 nt, Artificial Sequence
  Description of Artificial Sequence:  Enzymatic Nucleic Acid
ccacgaguggaggaaacucccuucaaggacaucguccggguagacucu

SEQ ID NO: 5623 - RNA, 48 nt, Artificial Sequence
  Description of Artificial Sequence:  Enzymatic Nucleic Acid
aaguccacggaggaaacucccuucaaggacaucguccgggacgagucu

SEQ ID NO: 5624 - RNA, 48 nt, Artificial Sequence
  Description of Artificial Sequence:  Enzymatic Nucleic Acid
gagaagucggaggaaacucccuucaaggacaucguccgggaccacgag

SEQ ID NO: 5625 - RNA, 48 nt, Artificial Sequence
  Description of Artificial Sequence:  Enzymatic Nucleic Acid
agagaaguggaggaaacucccuucaaggacaucguccgggcaccacga

SEQ ID NO: 5626 - RNA, 48 nt, Artificial Sequence
  Description of Artificial Sequence:  Enzymatic Nucleic Acid
uguuccccggaggaaacucccuucaaggacaucguccggguagaaaau

SEQ ID NO: 5627 - RNA, 48 nt, Artificial Sequence
  Description of Artificial Sequence:  Enzymatic Nucleic Acid
guguucccggaggaaacucccuucaaggacaucguccgggcuagaaaa

SEQ ID NO: 5628 - RNA, 48 nt, Artificial Sequence
  Description of Artificial Sequence:  Enzymatic Nucleic Acid
gguguuccggaggaaacucccuucaaggacaucguccgggccuagaaa

SEQ ID NO: 5629 - RNA, 48 nt, Artificial Sequence
  Description of Artificial Sequence:  Enzymatic Nucleic Acid
ggguguucggaggaaacucccuucaaggacaucguccgggcccuagaa

SEQ ID NO: 5630 - RNA, 48 nt, Artificial Sequence
  Description of Artificial Sequence:  Enzymatic Nucleic Acid
cggguguuggaggaaacucccuucaaggacaucguccgggccccuaga

SEQ ID NO: 5631 - RNA, 48 nt, Artificial Sequence
  Description of Artificial Sequence:  Enzymatic Nucleic Acid
auuuuggcggaggaaacucccuucaaggacaucguccgggaagacaca

SEQ ID NO: 5632 - RNA, 48 nt, Artificial Sequence
  Description of Artificial Sequence:  Enzymatic Nucleic Acid
gcgauaacggaggaaacucccuucaaggacaucguccgggaggacaaa

SEQ ID NO: 5633 - RNA, 48 nt, Artificial Sequence
  Description of Artificial Sequence:  Enzymatic Nucleic Acid
gacacaucggaggaaacucccuucaaggacaucguccgggagcgauaa

SEQ ID NO: 5634 - RNA, 48 nt, Artificial Sequence
  Description of Artificial Sequence:  Enzymatic Nucleic Acid
agacacauggaggaaacucccuucaaggacaucguccgggcagcgaua

SEQ ID NO: 5635 - RNA, 48 nt, Artificial Sequence
  Description of Artificial Sequence:  Enzymatic Nucleic Acid
uaaaacgcggaggaaacucccuucaaggacaucguccggggcagacac

SEQ ID NO: 5636 - RNA, 48 nt, Artificial Sequence
  Description of Artificial Sequence:  Enzymatic Nucleic Acid
agaagaacggaggaaacucccuucaaggacaucguccgggaacaagaa

SEQ ID NO: 5637 - RNA, 48 nt, Artificial Sequence
  Description of Artificial Sequence:  Enzymatic Nucleic Acid
ugauagucggaggaaacucccuucaaggacaucguccgggagaagaac

SEQ ID NO: 5638 - RNA, 48 nt, Artificial Sequence
  Description of Artificial Sequence:  Enzymatic Nucleic Acid
uugauaguggaggaaacucccuucaaggacaucguccgggcagaagaa

SEQ ID NO: 5639 - RNA, 48 nt, Artificial Sequence
  Description of Artificial Sequence:  Enzymatic Nucleic Acid
caacauacggaggaaacucccuucaaggacaucguccggguugauagu

SEQ ID NO: 5640 - RNA, 48 nt, Artificial Sequence
  Description of Artificial Sequence:  Enzymatic Nucleic Acid
ugaugaucggaggaaacucccuucaaggacaucguccggguggaauua

SEQ ID NO: 5641 - RNA, 48 nt, Artificial Sequence
  Description of Artificial Sequence:  Enzymatic Nucleic Acid
uugaugauggaggaaacucccuucaaggacaucguccgggcuggaauu

SEQ ID NO: 5642 - RNA, 48 nt, Artificial Sequence
  Description of Artificial Sequence:  Enzymatic Nucleic Acid
gcauggucggaggaaacucccuucaaggacaucguccgggggugcugg

SEQ ID NO: 5643 - RNA, 48 nt, Artificial Sequence
  Description of Artificial Sequence:  Enzymatic Nucleic Acid
ugcaugguggaggaaacucccuucaaggacaucguccgggcggugcug

SEQ ID NO: 5644 - RNA, 48 nt, Artificial Sequence
  Description of Artificial Sequence:  Enzymatic Nucleic Acid
agagguucggaggaaacucccuucaaggacaucguccggguugagcag

SEQ ID NO: 5645 - RNA, 48 nt, Artificial Sequence
  Description of Artificial Sequence:  Enzymatic Nucleic Acid
uagagguuggaggaaacucccuucaaggacaucguccgggcuugagca

SEQ ID NO: 5646 - RNA, 48 nt, Artificial Sequence
  Description of Artificial Sequence:  Enzymatic Nucleic Acid
uuuccgucggaggaaacucccuucaaggacaucguccgggguagguuu

SEQ ID NO: 5647 - RNA, 48 nt, Artificial Sequence
  Description of Artificial Sequence:  Enzymatic Nucleic Acid
guuuccguggaggaaacucccuucaaggacaucguccgggcguagguu

SEQ ID NO: 5648 - RNA, 48 nt, Artificial Sequence
  Description of Artificial Sequence:  Enzymatic Nucleic Acid
gcaguuucggaggaaacucccuucaaggacaucguccgggguccguag

SEQ ID NO: 5649 - RNA, 48 nt, Artificial Sequence
  Description of Artificial Sequence:  Enzymatic Nucleic Acid
ugcaguuuggaggaaacucccuucaaggacaucguccgggcguccgua

SEQ ID NO: 5650 - RNA, 48 nt, Artificial Sequence
  Description of Artificial Sequence:  Enzymatic Nucleic Acid
cgaaagccggaggaaacucccuucaaggacaucguccgggaagaugau

SEQ ID NO: 5651 - RNA, 48 nt, Artificial Sequence
  Description of Artificial Sequence:  Enzymatic Nucleic Acid
gcgaaagcggaggaaacucccuucaaggacaucguccgggcaagauga

SEQ ID NO: 5652 - RNA, 48 nt, Artificial Sequence
  Description of Artificial Sequence:  Enzymatic Nucleic Acid
cccacuccggaggaaacucccuucaaggacaucguccgggauagguau

SEQ ID NO: 5653 - RNA, 48 nt, Artificial Sequence
  Description of Artificial Sequence:  Enzymatic Nucleic Acid
gcccacucggaggaaacucccuucaaggacaucguccgggcauaggua

SEQ ID NO: 5654 - RNA, 48 nt, Artificial Sequence
  Description of Artificial Sequence:  Enzymatic Nucleic Acid
ggcccacuggaggaaacucccuucaaggacaucguccgggccauaggu

SEQ ID NO: 5655 - RNA, 48 nt, Artificial Sequence
  Description of Artificial Sequence:  Enzymatic Nucleic Acid
cugaggccggaggaaacucccuucaaggacaucguccgggacucccau

SEQ ID NO: 5656 - RNA, 48 nt, Artificial Sequence
  Description of Artificial Sequence:  Enzymatic Nucleic Acid
acugaggcggaggaaacucccuucaaggacaucguccgggcacuccca

SEQ ID NO: 5657 - RNA, 48 nt, Artificial Sequence
  Description of Artificial Sequence:  Enzymatic Nucleic Acid
aacugagcggaggaaacucccuucaaggacaucguccgggaagagaaa

SEQ ID NO: 5658 - RNA, 48 nt, Artificial Sequence
  Description of Artificial Sequence:  Enzymatic Nucleic Acid
cuacgaacggaggaaacucccuucaaggacaucguccgggacugaaca

SEQ ID NO: 5659 - RNA, 48 nt, Artificial Sequence
  Description of Artificial Sequence:  Enzymatic Nucleic Acid
ggaaagccggaggaaacucccuucaaggacaucguccggguacgaacc

SEQ ID NO: 5660 - RNA, 48 nt, Artificial Sequence
  Description of Artificial Sequence:  Enzymatic Nucleic Acid
gggaaagcggaggaaacucccuucaaggacaucguccgggcuacgaac

SEQ ID NO: 5661 - RNA, 48 nt, Artificial Sequence
  Description of Artificial Sequence:  Enzymatic Nucleic Acid
cugaaagcggaggaaacucccuucaaggacaucguccgggagacagug

SEQ ID NO: 5662 - RNA, 48 nt, Artificial Sequence
  Description of Artificial Sequence:  Enzymatic Nucleic Acid
acaucaucggaggaaacucccuucaaggacaucguccgggauauaacu

SEQ ID NO: 5663 - RNA, 48 nt, Artificial Sequence
  Description of Artificial Sequence:  Enzymatic Nucleic Acid
cacaucauggaggaaacucccuucaaggacaucguccgggcauauaac

SEQ ID NO: 5664 - RNA, 48 nt, Artificial Sequence
  Description of Artificial Sequence:  Enzymatic Nucleic Acid
cccaaaacggaggaaacucccuucaaggacaucguccgggacaucauc

SEQ ID NO: 5665 - RNA, 48 nt, Artificial Sequence
  Description of Artificial Sequence:  Enzymatic Nucleic Acid
uuggccccggaggaaacucccuucaaggacaucguccgggaaaaccac

SEQ ID NO: 5666 - RNA, 48 nt, Artificial Sequence
  Description of Artificial Sequence:  Enzymatic Nucleic Acid
cuuggcccggaggaaacucccuucaaggacaucguccgggcaaaacca

SEQ ID NO: 5667 - RNA, 48 nt, Artificial Sequence
  Description of Artificial Sequence:  Enzymatic Nucleic Acid
acuuggccggaggaaacucccuucaaggacaucguccgggccaaaacc

SEQ ID NO: 5668 - RNA, 48 nt, Artificial Sequence
  Description of Artificial Sequence:  Enzymatic Nucleic Acid
gacuuggcggaggaaacucccuucaaggacaucguccgggcccaaaac

SEQ ID NO: 5669 - RNA, 48 nt, Artificial Sequence
  Description of Artificial Sequence:  Enzymatic Nucleic Acid
uguauaccggaggaaacucccuucaaggacaucguccgggaaagacaa

SEQ ID NO: 5670 - RNA, 48 nt, Artificial Sequence
  Description of Artificial Sequence:  Enzymatic Nucleic Acid
auguauacggaggaaacucccuucaaggacaucguccgggcaaagaca

SEQ ID NO: 5671 - RNA, 48 nt, Artificial Sequence
  Description of Artificial Sequence:  Enzymatic Nucleic Acid
auccccauggaggaaacucccuucaaggacaucguccggguuuuuguu

SEQ ID NO: 5672 - RNA, 48 nt, Artificial Sequence
  Description of Artificial Sequence:  Enzymatic Nucleic Acid
aauaucccggaggaaacucccuucaaggacaucguccgggaucuuuuu

SEQ ID NO: 5673 - RNA, 48 nt, Artificial Sequence
  Description of Artificial Sequence:  Enzymatic Nucleic Acid
gaauauccggaggaaacucccuucaaggacaucguccgggcaucuuuu

SEQ ID NO: 5674 - RNA, 48 nt, Artificial Sequence
  Description of Artificial Sequence:  Enzymatic Nucleic Acid
ggaauaucggaggaaacucccuucaaggacaucguccgggccaucuuu

SEQ ID NO: 5675 - RNA, 48 nt, Artificial Sequence
  Description of Artificial Sequence:  Enzymatic Nucleic Acid
gggaauauggaggaaacucccuucaaggacaucguccgggcccaucuu

SEQ ID NO: 5676 - RNA, 48 nt, Artificial Sequence
  Description of Artificial Sequence:  Enzymatic Nucleic Acid
acauauccggaggaaacucccuucaaggacaucguccgggaugaaguu

SEQ ID NO: 5677 - RNA, 48 nt, Artificial Sequence
  Description of Artificial Sequence:  Enzymatic Nucleic Acid
uacauaucggaggaaacucccuucaaggacaucguccgggcaugaagu

SEQ ID NO: 5678 - RNA, 48 nt, Artificial Sequence
  Description of Artificial Sequence:  Enzymatic Nucleic Acid
uuacauauggaggaaacucccuucaaggacaucguccgggccaugaag

SEQ ID NO: 5679 - RNA, 48 nt, Artificial Sequence
  Description of Artificial Sequence:  Enzymatic Nucleic Acid
ccaacuccggaggaaacucccuucaaggacaucguccgggaauuacau

SEQ ID NO: 5680 - RNA, 48 nt, Artificial Sequence
  Description of Artificial Sequence:  Enzymatic Nucleic Acid
cccaacucggaggaaacucccuucaaggacaucguccgggcaauuaca

SEQ ID NO: 5681 - RNA, 48 nt, Artificial Sequence
  Description of Artificial Sequence:  Enzymatic Nucleic Acid
ccccaacuggaggaaacucccuucaaggacaucguccgggccaauuac

SEQ ID NO: 5682 - RNA, 48 nt, Artificial Sequence
  Description of Artificial Sequence:  Enzymatic Nucleic Acid
augugcccggaggaaacucccuucaaggacaucguccgggaacuccca

SEQ ID NO: 5683 - RNA, 48 nt, Artificial Sequence
  Description of Artificial Sequence:  Enzymatic Nucleic Acid
aaugugccggaggaaacucccuucaaggacaucguccgggcaacuccc

SEQ ID NO: 5684 - RNA, 48 nt, Artificial Sequence
  Description of Artificial Sequence:  Enzymatic Nucleic Acid
caaugugcggaggaaacucccuucaaggacaucguccgggccaacucc

SEQ ID NO: 5685 - RNA, 48 nt, Artificial Sequence
  Description of Artificial Sequence:  Enzymatic Nucleic Acid
auauguucggaggaaacucccuucaaggacaucguccggguguggcaa

SEQ ID NO: 5686 - RNA, 48 nt, Artificial Sequence
  Description of Artificial Sequence:  Enzymatic Nucleic Acid
aauauguuggaggaaacucccuucaaggacaucguccgggcuguggca

SEQ ID NO: 5687 - RNA, 48 nt, Artificial Sequence
  Description of Artificial Sequence:  Enzymatic Nucleic Acid
gaaguuucggaggaaacucccuucaaggacaucguccggguaaaacac

SEQ ID NO: 5688 - RNA, 48 nt, Artificial Sequence
  Description of Artificial Sequence:  Enzymatic Nucleic Acid
ggaaguuuggaggaaacucccuucaaggacaucguccgggcuaaaaca

SEQ ID NO: 5689 - RNA, 48 nt, Artificial Sequence
  Description of Artificial Sequence:  Enzymatic Nucleic Acid
caauaggcggaggaaacucccuucaaggacaucguccggguguuuaca

SEQ ID NO: 5690 - RNA, 48 nt, Artificial Sequence
  Description of Artificial Sequence:  Enzymatic Nucleic Acid
auacuuucggaggaaacucccuucaaggacaucguccgggaaucaaua

SEQ ID NO: 5691 - RNA, 48 nt, Artificial Sequence
  Description of Artificial Sequence:  Enzymatic Nucleic Acid
cauacuuuggaggaaacucccuucaaggacaucguccgggcaaucaau

SEQ ID NO: 5692 - RNA, 48 nt, Artificial Sequence
  Description of Artificial Sequence:  Enzymatic Nucleic Acid
aaaagaccggaggaaacucccuucaaggacaucguccgggacaauucg

SEQ ID NO: 5693 - RNA, 48 nt, Artificial Sequence
  Description of Artificial Sequence:  Enzymatic Nucleic Acid
caaaagacggaggaaacucccuucaaggacaucguccgggcacaauuc

SEQ ID NO: 5694 - RNA, 48 nt, Artificial Sequence
  Description of Artificial Sequence:  Enzymatic Nucleic Acid
gcaaacccggaggaaacucccuucaaggacaucguccgggaaaagacc

SEQ ID NO: 5695 - RNA, 48 nt, Artificial Sequence
  Description of Artificial Sequence:  Enzymatic Nucleic Acid
ggcaaaccggaggaaacucccuucaaggacaucguccgggcaaaagac

SEQ ID NO: 5696 - RNA, 48 nt, Artificial Sequence
  Description of Artificial Sequence:  Enzymatic Nucleic Acid
cggcaaacggaggaaacucccuucaaggacaucguccgggccaaaaga

SEQ ID NO: 5697 - RNA, 48 nt, Artificial Sequence
  Description of Artificial Sequence:  Enzymatic Nucleic Acid
agaauaucggaggaaacucccuucaaggacaucguccgggacauugcg

SEQ ID NO: 5698 - RNA, 48 nt, Artificial Sequence
  Description of Artificial Sequence:  Enzymatic Nucleic Acid
cagaauauggaggaaacucccuucaaggacaucguccgggcacauugc

SEQ ID NO: 5699 - RNA, 48 nt, Artificial Sequence
  Description of Artificial Sequence:  Enzymatic Nucleic Acid
guaaaagcggaggaaacucccuucaaggacaucguccggguguuuugc

SEQ ID NO: 5700 - RNA, 48 nt, Artificial Sequence
  Description of Artificial Sequence:  Enzymatic Nucleic Acid
agaaaggcggaggaaacucccuucaaggacaucguccggguuguaagu

SEQ ID NO: 5701 - RNA, 48 nt, Artificial Sequence
  Description of Artificial Sequence:  Enzymatic Nucleic Acid
gccguugcggaggaaacucccuucaaggacaucguccggggagcaacg

SEQ ID NO: 5702 - RNA, 48 nt, Artificial Sequence
  Description of Artificial Sequence:  Enzymatic Nucleic Acid
gaccaggcggaggaaacucccuucaaggacaucguccgggguugccga

SEQ ID NO: 5703 - RNA, 48 nt, Artificial Sequence
  Description of Artificial Sequence:  Enzymatic Nucleic Acid
gcauagacggaggaaacucccuucaaggacaucguccgggaggccguu

SEQ ID NO: 5704 - RNA, 48 nt, Artificial Sequence
  Description of Artificial Sequence:  Enzymatic Nucleic Acid
gccccaacggaggaaacucccuucaaggacaucguccgggaguggggg

SEQ ID NO: 5705 - RNA, 48 nt, Artificial Sequence
  Description of Artificial Sequence:  Enzymatic Nucleic Acid
ccaagcccggaggaaacucccuucaaggacaucguccgggaaccagug

SEQ ID NO: 5706 - RNA, 48 nt, Artificial Sequence
  Description of Artificial Sequence:  Enzymatic Nucleic Acid
gccaagccggaggaaacucccuucaaggacaucguccgggcaaccagu

SEQ ID NO: 5707 - RNA, 48 nt, Artificial Sequence
  Description of Artificial Sequence:  Enzymatic Nucleic Acid
ggccaagcggaggaaacucccuucaaggacaucguccgggccaaccag

SEQ ID NO: 5708 - RNA, 48 nt, Artificial Sequence
  Description of Artificial Sequence:  Enzymatic Nucleic Acid
ccuauggcggaggaaacucccuucaaggacaucguccgggaagcccca

SEQ ID NO: 5709 - RNA, 48 nt, Artificial Sequence
  Description of Artificial Sequence:  Enzymatic Nucleic Acid
cugauggcggaggaaacucccuucaaggacaucguccggguauggcca

SEQ ID NO: 5710 - RNA, 48 nt, Artificial Sequence
  Description of Artificial Sequence:  Enzymatic Nucleic Acid
aaagguucggaggaaacucccuucaaggacaucguccgggacgcaugc

SEQ ID NO: 5711 - RNA, 48 nt, Artificial Sequence
  Description of Artificial Sequence:  Enzymatic Nucleic Acid
caaagguuggaggaaacucccuucaaggacaucguccgggcacgcaug

SEQ ID NO: 5712 - RNA, 48 nt, Artificial Sequence
  Description of Artificial Sequence:  Enzymatic Nucleic Acid
aggaguucggaggaaacucccuucaaggacaucguccggggcgguaug

SEQ ID NO: 5713 - RNA, 48 nt, Artificial Sequence
  Description of Artificial Sequence:  Enzymatic Nucleic Acid
uaggaguuggaggaaacucccuucaaggacaucguccgggcgcgguau

SEQ ID NO: 5714 - RNA, 48 nt, Artificial Sequence
  Description of Artificial Sequence:  Enzymatic Nucleic Acid
ccccagacggaggaaacucccuucaaggacaucguccgggugcugcga

SEQ ID NO: 5715 - RNA, 48 nt, Artificial Sequence
  Description of Artificial Sequence:  Enzymatic Nucleic Acid
uuuugcccggaggaaacucccuucaaggacaucguccgggagaccugc

SEQ ID NO: 5716 - RNA, 48 nt, Artificial Sequence
  Description of Artificial Sequence:  Enzymatic Nucleic Acid
guuuugccggaggaaacucccuucaaggacaucguccgggcagaccug

SEQ ID NO: 5717 - RNA, 48 nt, Artificial Sequence
  Description of Artificial Sequence:  Enzymatic Nucleic Acid
aguuuugcggaggaaacucccuucaaggacaucguccgggccagaccu

SEQ ID NO: 5718 - RNA, 48 nt, Artificial Sequence
  Description of Artificial Sequence:  Enzymatic Nucleic Acid
gucaguccggaggaaacucccuucaaggacaucguccggggaugaguu

SEQ ID NO: 5719 - RNA, 48 nt, Artificial Sequence
  Description of Artificial Sequence:  Enzymatic Nucleic Acid
ugucagucggaggaaacucccuucaaggacaucguccgggcgaugagu

SEQ ID NO: 5720 - RNA, 48 nt, Artificial Sequence
  Description of Artificial Sequence:  Enzymatic Nucleic Acid
uugucaguggaggaaacucccuucaaggacaucguccgggccgaugag

SEQ ID NO: 5721 - RNA, 48 nt, Artificial Sequence
  Description of Artificial Sequence:  Enzymatic Nucleic Acid
cuagcagcggaggaaacucccuucaaggacaucguccgggauggaaau

SEQ ID NO: 5722 - RNA, 48 nt, Artificial Sequence
  Description of Artificial Sequence:  Enzymatic Nucleic Acid
agcacagcggaggaaacucccuucaaggacaucguccggguagcagcc

SEQ ID NO: 5723 - RNA, 48 nt, Artificial Sequence
  Description of Artificial Sequence:  Enzymatic Nucleic Acid
guaggaucggaggaaacucccuucaaggacaucguccgggaguuggca

SEQ ID NO: 5724 - RNA, 48 nt, Artificial Sequence
  Description of Artificial Sequence:  Enzymatic Nucleic Acid
cguaggauggaggaaacucccuucaaggacaucguccgggcaguuggc

SEQ ID NO: 5725 - RNA, 48 nt, Artificial Sequence
  Description of Artificial Sequence:  Enzymatic Nucleic Acid
ggacguccggaggaaacucccuucaaggacaucguccggggcguagga

SEQ ID NO: 5726 - RNA, 48 nt, Artificial Sequence
  Description of Artificial Sequence:  Enzymatic Nucleic Acid
aggacgucggaggaaacucccuucaaggacaucguccgggcgcguagg

SEQ ID NO: 5727 - RNA, 48 nt, Artificial Sequence
  Description of Artificial Sequence:  Enzymatic Nucleic Acid
aaggacguggaggaaacucccuucaaggacaucguccgggccgcguag

SEQ ID NO: 5728 - RNA, 48 nt, Artificial Sequence
  Description of Artificial Sequence:  Enzymatic Nucleic Acid
uucagcgcggaggaaacucccuucaaggacaucguccggggacgggac

SEQ ID NO: 5729 - RNA, 48 nt, Artificial Sequence
  Description of Artificial Sequence:  Enzymatic Nucleic Acid
gggucgucggaggaaacucccuucaaggacaucguccggggcgggauu

SEQ ID NO: 5730 - RNA, 48 nt, Artificial Sequence
  Description of Artificial Sequence:  Enzymatic Nucleic Acid
ggggucguggaggaaacucccuucaaggacaucguccgggcgcgggau

SEQ ID NO: 5731 - RNA, 48 nt, Artificial Sequence
  Description of Artificial Sequence:  Enzymatic Nucleic Acid
agcggcccggaggaaacucccuucaaggacaucguccggggggagggg

SEQ ID NO: 5732 - RNA, 48 nt, Artificial Sequence
  Description of Artificial Sequence:  Enzymatic Nucleic Acid
aagcggccggaggaaacucccuucaaggacaucguccgggcgggaggg

SEQ ID NO: 5733 - RNA, 48 nt, Artificial Sequence
  Description of Artificial Sequence:  Enzymatic Nucleic Acid
caagcggcggaggaaacucccuucaaggacaucguccgggccgggagg

SEQ ID NO: 5734 - RNA, 48 nt, Artificial Sequence
  Description of Artificial Sequence:  Enzymatic Nucleic Acid
uagagcccggaggaaacucccuucaaggacaucguccgggaagcggcc

SEQ ID NO: 5735 - RNA, 48 nt, Artificial Sequence
  Description of Artificial Sequence:  Enzymatic Nucleic Acid
guagagccggaggaaacucccuucaaggacaucguccgggcaagcggc

SEQ ID NO: 5736 - RNA, 48 nt, Artificial Sequence
  Description of Artificial Sequence:  Enzymatic Nucleic Acid
gguagagcggaggaaacucccuucaaggacaucguccgggccaagcgg

SEQ ID NO: 5737 - RNA, 48 nt, Artificial Sequence
  Description of Artificial Sequence:  Enzymatic Nucleic Acid
gugcgcccggaggaaacucccuucaaggacaucguccgggguggacgg

SEQ ID NO: 5738 - RNA, 48 nt, Artificial Sequence
  Description of Artificial Sequence:  Enzymatic Nucleic Acid
ggugcgccggaggaaacucccuucaaggacaucguccgggcguggacg

SEQ ID NO: 5739 - RNA, 48 nt, Artificial Sequence
  Description of Artificial Sequence:  Enzymatic Nucleic Acid
aggugcgcggaggaaacucccuucaaggacaucguccgggccguggac

SEQ ID NO: 5740 - RNA, 48 nt, Artificial Sequence
  Description of Artificial Sequence:  Enzymatic Nucleic Acid
ggggagucggaggaaacucccuucaaggacaucguccggggcguaaag

SEQ ID NO: 5741 - RNA, 48 nt, Artificial Sequence
  Description of Artificial Sequence:  Enzymatic Nucleic Acid
cggggaguggaggaaacucccuucaaggacaucguccgggcgcguaaa

SEQ ID NO: 5742 - RNA, 48 nt, Artificial Sequence
  Description of Artificial Sequence:  Enzymatic Nucleic Acid
acacggucggaggaaacucccuucaaggacaucguccgggggcagaug

SEQ ID NO: 5743 - RNA, 48 nt, Artificial Sequence
  Description of Artificial Sequence:  Enzymatic Nucleic Acid
cacacgguggaggaaacucccuucaaggacaucguccgggcggcagau

SEQ ID NO: 5744 - RNA, 48 nt, Artificial Sequence
  Description of Artificial Sequence:  Enzymatic Nucleic Acid
guggucucggaggaaacucccuucaaggacaucguccgggaugcgacg

SEQ ID NO: 5745 - RNA, 48 nt, Artificial Sequence
  Description of Artificial Sequence:  Enzymatic Nucleic Acid
gguggucuggaggaaacucccuucaaggacaucguccgggcaugcgac

SEQ ID NO: 5746 - RNA, 48 nt, Artificial Sequence
  Description of Artificial Sequence:  Enzymatic Nucleic Acid
acggugguggaggaaacucccuucaaggacaucguccggguccaugcg

SEQ ID NO: 5747 - RNA, 48 nt, Artificial Sequence
  Description of Artificial Sequence:  Enzymatic Nucleic Acid
gcagguucggaggaaacucccuucaaggacaucguccgggugugggcg

SEQ ID NO: 5748 - RNA, 48 nt, Artificial Sequence
  Description of Artificial Sequence:  Enzymatic Nucleic Acid
ggcagguuggaggaaacucccuucaaggacaucguccgggcugugggc

SEQ ID NO: 5749 - RNA, 48 nt, Artificial Sequence
  Description of Artificial Sequence:  Enzymatic Nucleic Acid
ugcaagacggaggaaacucccuucaaggacaucguccggguugggcag

SEQ ID NO: 5750 - RNA, 48 nt, Artificial Sequence
  Description of Artificial Sequence:  Enzymatic Nucleic Acid
agaguccuggaggaaacucccuucaaggacaucguccggguuaugcaa

SEQ ID NO: 5751 - RNA, 48 nt, Artificial Sequence
  Description of Artificial Sequence:  Enzymatic Nucleic Acid
caagagucggaggaaacucccuucaaggacaucguccgggucuuaugc

SEQ ID NO: 5752 - RNA, 48 nt, Artificial Sequence
  Description of Artificial Sequence:  Enzymatic Nucleic Acid
ccaagaguggaggaaacucccuucaaggacaucguccgggcucuuaug

SEQ ID NO: 5753 - RNA, 48 nt, Artificial Sequence
  Description of Artificial Sequence:  Enzymatic Nucleic Acid
ugaaagucggaggaaacucccuucaaggacaucguccgggaagagucc

SEQ ID NO: 5754 - RNA, 48 nt, Artificial Sequence
  Description of Artificial Sequence:  Enzymatic Nucleic Acid
cugaaaguggaggaaacucccuucaaggacaucguccgggcaagaguc

SEQ ID NO: 5755 - RNA, 48 nt, Artificial Sequence
  Description of Artificial Sequence:  Enzymatic Nucleic Acid
aaguaugcggaggaaacucccuucaaggacaucguccgggucaagguc

SEQ ID NO: 5756 - RNA, 48 nt, Artificial Sequence
  Description of Artificial Sequence:  Enzymatic Nucleic Acid
cacacaguggaggaaacucccuucaaggacaucguccggguuugaagu

SEQ ID NO: 5757 - RNA, 48 nt, Artificial Sequence
  Description of Artificial Sequence:  Enzymatic Nucleic Acid
acuccuccggaggaaacucccuucaaggacaucguccgggacucauua

SEQ ID NO: 5758 - RNA, 48 nt, Artificial Sequence
  Description of Artificial Sequence:  Enzymatic Nucleic Acid
aacuccucggaggaaacucccuucaaggacaucguccgggcacucauu

SEQ ID NO: 5759 - RNA, 48 nt, Artificial Sequence
  Description of Artificial Sequence:  Enzymatic Nucleic Acid
caacuccuggaggaaacucccuucaaggacaucguccgggccacucau

SEQ ID NO: 5760 - RNA, 48 nt, Artificial Sequence
  Description of Artificial Sequence:  Enzymatic Nucleic Acid
cccaacucggaggaaacucccuucaaggacaucguccgggucccacuc

SEQ ID NO: 5761 - RNA, 48 nt, Artificial Sequence
  Description of Artificial Sequence:  Enzymatic Nucleic Acid
ccccaacuggaggaaacucccuucaaggacaucguccgggcucccacu

SEQ ID NO: 5762 - RNA, 48 nt, Artificial Sequence
  Description of Artificial Sequence:  Enzymatic Nucleic Acid
uccuccccggaggaaacucccuucaaggacaucguccgggaacuccuc

SEQ ID NO: 5763 - RNA, 48 nt, Artificial Sequence
  Description of Artificial Sequence:  Enzymatic Nucleic Acid
cuccucccggaggaaacucccuucaaggacaucguccgggcaacuccu

SEQ ID NO: 5764 - RNA, 48 nt, Artificial Sequence
  Description of Artificial Sequence:  Enzymatic Nucleic Acid
ccuccuccggaggaaacucccuucaaggacaucguccgggccaacucc

SEQ ID NO: 5765 - RNA, 48 nt, Artificial Sequence
  Description of Artificial Sequence:  Enzymatic Nucleic Acid
accuccucggaggaaacucccuucaaggacaucguccgggcccaacuc

SEQ ID NO: 5766 - RNA, 48 nt, Artificial Sequence
  Description of Artificial Sequence:  Enzymatic Nucleic Acid
aaccuccuggaggaaacucccuucaaggacaucguccgggccccaacu

SEQ ID NO: 5767 - RNA, 48 nt, Artificial Sequence
  Description of Artificial Sequence:  Enzymatic Nucleic Acid
cuaaccucggaggaaacucccuucaaggacaucguccgggucccccaa

SEQ ID NO: 5768 - RNA, 48 nt, Artificial Sequence
  Description of Artificial Sequence:  Enzymatic Nucleic Acid
ccuaaccuggaggaaacucccuucaaggacaucguccgggcuccccca

SEQ ID NO: 5769 - RNA, 48 nt, Artificial Sequence
  Description of Artificial Sequence:  Enzymatic Nucleic Acid
aaccuaacggaggaaacucccuucaaggacaucguccggguccucccc

SEQ ID NO: 5770 - RNA, 48 nt, Artificial Sequence
  Description of Artificial Sequence:  Enzymatic Nucleic Acid
ccuuuaacggaggaaacucccuucaaggacaucguccggguaaccucc

SEQ ID NO: 5771 - RNA, 48 nt, Artificial Sequence
  Description of Artificial Sequence:  Enzymatic Nucleic Acid
acaaagacggaggaaacucccuucaaggacaucguccggguuuaaccu

SEQ ID NO: 5772 - RNA, 48 nt, Artificial Sequence
  Description of Artificial Sequence:  Enzymatic Nucleic Acid
acagccucggaggaaacucccuucaaggacaucguccggguaguacaa

SEQ ID NO: 5773 - RNA, 48 nt, Artificial Sequence
  Description of Artificial Sequence:  Enzymatic Nucleic Acid
uacagccuggaggaaacucccuucaaggacaucguccgggcuaguaca

SEQ ID NO: 5774 - RNA, 48 nt, Artificial Sequence
  Description of Artificial Sequence:  Enzymatic Nucleic Acid
ccuacagcggaggaaacucccuucaaggacaucguccggguccuagua

SEQ ID NO: 5775 - RNA, 48 nt, Artificial Sequence
  Description of Artificial Sequence:  Enzymatic Nucleic Acid
auuuaugcggaggaaacucccuucaaggacaucguccggguacagccu

SEQ ID NO: 5776 - RNA, 48 nt, Artificial Sequence
  Description of Artificial Sequence:  Enzymatic Nucleic Acid
gaacacacggaggaaacucccuucaaggacaucguccgggaauuuaug

SEQ ID NO: 5777 - RNA, 48 nt, Artificial Sequence
  Description of Artificial Sequence:  Enzymatic Nucleic Acid
aagccaccggaggaaacucccuucaaggacaucguccgggaaggcaca

SEQ ID NO: 5778 - RNA, 48 nt, Artificial Sequence
  Description of Artificial Sequence:  Enzymatic Nucleic Acid
aaagccacggaggaaacucccuucaaggacaucguccgggcaaggcac

SEQ ID NO: 5779 - RNA, 48 nt, Artificial Sequence
  Description of Artificial Sequence:  Enzymatic Nucleic Acid
cccaaagcggaggaaacucccuucaaggacaucguccgggacccaagg

SEQ ID NO: 5780 - RNA, 48 nt, Artificial Sequence
  Description of Artificial Sequence:  Enzymatic Nucleic Acid
ccaugcccggaggaaacucccuucaaggacaucguccgggaaagccac

SEQ ID NO: 5781 - RNA, 48 nt, Artificial Sequence
  Description of Artificial Sequence:  Enzymatic Nucleic Acid
uccaugccggaggaaacucccuucaaggacaucguccgggcaaagcca

SEQ ID NO: 5782 - RNA, 48 nt, Artificial Sequence
  Description of Artificial Sequence:  Enzymatic Nucleic Acid
guccaugcggaggaaacucccuucaaggacaucguccgggccaaagcc

SEQ ID NO: 5783 - RNA, 48 nt, Artificial Sequence
  Description of Artificial Sequence:  Enzymatic Nucleic Acid
ucaaugucggaggaaacucccuucaaggacaucguccgggaugcccca

SEQ ID NO: 5784 - RNA, 48 nt, Artificial Sequence
  Description of Artificial Sequence:  Enzymatic Nucleic Acid
gucaauguggaggaaacucccuucaaggacaucguccgggcaugcccc

SEQ ID NO: 5785 - RNA, 48 nt, Artificial Sequence
  Description of Artificial Sequence:  Enzymatic Nucleic Acid
uccaaauuggaggaaacucccuucaaggacaucguccggguuuauacg

SEQ ID NO: 5786 - RNA, 48 nt, Artificial Sequence
  Description of Artificial Sequence:  Enzymatic Nucleic Acid
agaagcucggaggaaacucccuucaaggacaucguccgggaaauucuu

SEQ ID NO: 5787 - RNA, 48 nt, Artificial Sequence
  Description of Artificial Sequence:  Enzymatic Nucleic Acid
cagaagcuggaggaaacucccuucaaggacaucguccgggcaaauucu

SEQ ID NO: 5788 - RNA, 48 nt, Artificial Sequence
  Description of Artificial Sequence:  Enzymatic Nucleic Acid
aguaacucggaggaaacucccuucaaggacaucguccgggacagaagc

SEQ ID NO: 5789 - RNA, 48 nt, Artificial Sequence
  Description of Artificial Sequence:  Enzymatic Nucleic Acid
gaguaacuggaggaaacucccuucaaggacaucguccgggcacagaag

SEQ ID NO: 5790 - RNA, 48 nt, Artificial Sequence
  Description of Artificial Sequence:  Enzymatic Nucleic Acid
gaggagauggaggaaacucccuucaaggacaucguccgggucgaauag

SEQ ID NO: 5791 - RNA, 48 nt, Artificial Sequence
  Description of Artificial Sequence:  Enzymatic Nucleic Acid
aggcccccggaggaaacucccuucaaggacaucguccggggauacaga

SEQ ID NO: 5792 - RNA, 48 nt, Artificial Sequence
  Description of Artificial Sequence:  Enzymatic Nucleic Acid
aaggccccggaggaaacucccuucaaggacaucguccgggcgauacag

SEQ ID NO: 5793 - RNA, 48 nt, Artificial Sequence
  Description of Artificial Sequence:  Enzymatic Nucleic Acid
uaaggcccggaggaaacucccuucaaggacaucguccgggccgauaca

SEQ ID NO: 5794 - RNA, 48 nt, Artificial Sequence
  Description of Artificial Sequence:  Enzymatic Nucleic Acid
cuaaggccggaggaaacucccuucaaggacaucguccgggcccgauac

SEQ ID NO: 5795 - RNA, 48 nt, Artificial Sequence
  Description of Artificial Sequence:  Enzymatic Nucleic Acid
ucuaaggcggaggaaacucccuucaaggacaucguccgggccccgaua

SEQ ID NO: 5796 - RNA, 48 nt, Artificial Sequence
  Description of Artificial Sequence:  Enzymatic Nucleic Acid
cggagacuggaggaaacucccuucaaggacaucguccggguaaggccc

SEQ ID NO: 5797 - RNA, 48 nt, Artificial Sequence
  Description of Artificial Sequence:  Enzymatic Nucleic Acid
caauguucggaggaaacucccuucaaggacaucguccgggggagacuc

SEQ ID NO: 5798 - RNA, 48 nt, Artificial Sequence
  Description of Artificial Sequence:  Enzymatic Nucleic Acid
acaauguuggaggaaacucccuucaaggacaucguccgggcggagacu

SEQ ID NO: 5799 - RNA, 48 nt, Artificial Sequence
  Description of Artificial Sequence:  Enzymatic Nucleic Acid
cugagugcggaggaaacucccuucaaggacaucguccgggguauggug

SEQ ID NO: 5800 - RNA, 48 nt, Artificial Sequence
  Description of Artificial Sequence:  Enzymatic Nucleic Acid
uagcuugcggaggaaacucccuucaaggacaucguccgggugagugcc

SEQ ID NO: 5801 - RNA, 48 nt, Artificial Sequence
  Description of Artificial Sequence:  Enzymatic Nucleic Acid
acucacccggaggaaacucccuucaaggacaucguccgggaacacaga

SEQ ID NO: 5802 - RNA, 48 nt, Artificial Sequence
  Description of Artificial Sequence:  Enzymatic Nucleic Acid
aacucaccggaggaaacucccuucaaggacaucguccgggcaacacag

SEQ ID NO: 5803 - RNA, 48 nt, Artificial Sequence
  Description of Artificial Sequence:  Enzymatic Nucleic Acid
caacucacggaggaaacucccuucaaggacaucguccgggccaacaca

SEQ ID NO: 5804 - RNA, 48 nt, Artificial Sequence
  Description of Artificial Sequence:  Enzymatic Nucleic Acid
uucccaccggaggaaacucccuucaaggacaucguccgggagguggcu

SEQ ID NO: 5805 - RNA, 48 nt, Artificial Sequence
  Description of Artificial Sequence:  Enzymatic Nucleic Acid
cuucccacggaggaaacucccuucaaggacaucguccgggcagguggc

SEQ ID NO: 5806 - RNA, 48 nt, Artificial Sequence
  Description of Artificial Sequence:  Enzymatic Nucleic Acid
uuacuuccggaggaaacucccuucaaggacaucguccgggacccaggu

SEQ ID NO: 5807 - RNA, 48 nt, Artificial Sequence
  Description of Artificial Sequence:  Enzymatic Nucleic Acid
auuacuucggaggaaacucccuucaaggacaucguccgggcacccagg

SEQ ID NO: 5808 - RNA, 48 nt, Artificial Sequence
  Description of Artificial Sequence:  Enzymatic Nucleic Acid
aauuacuuggaggaaacucccuucaaggacaucguccgggccacccag

SEQ ID NO: 5809 - RNA, 48 nt, Artificial Sequence
  Description of Artificial Sequence:  Enzymatic Nucleic Acid
ggaucuucggaggaaacucccuucaaggacaucguccgggaaauuacu

SEQ ID NO: 5810 - RNA, 48 nt, Artificial Sequence
  Description of Artificial Sequence:  Enzymatic Nucleic Acid
uggaucuuggaggaaacucccuucaaggacaucguccgggcaaauuac

SEQ ID NO: 5811 - RNA, 48 nt, Artificial Sequence
  Description of Artificial Sequence:  Enzymatic Nucleic Acid
ugcuggauggaggaaacucccuucaaggacaucguccggguuccaaau

SEQ ID NO: 5812 - RNA, 48 nt, Artificial Sequence
  Description of Artificial Sequence:  Enzymatic Nucleic Acid
cuaauuccggaggaaacucccuucaaggacaucguccggguggaugcu

SEQ ID NO: 5813 - RNA, 48 nt, Artificial Sequence
  Description of Artificial Sequence:  Enzymatic Nucleic Acid
acuaauucggaggaaacucccuucaaggacaucguccgggcuggaugc

SEQ ID NO: 5814 - RNA, 48 nt, Artificial Sequence
  Description of Artificial Sequence:  Enzymatic Nucleic Acid
uacuaauuggaggaaacucccuucaaggacaucguccgggccuggaug

SEQ ID NO: 5815 - RNA, 48 nt, Artificial Sequence
  Description of Artificial Sequence:  Enzymatic Nucleic Acid
uuuaggccggaggaaacucccuucaaggacaucguccgggauauuaac

SEQ ID NO: 5816 - RNA, 48 nt, Artificial Sequence
  Description of Artificial Sequence:  Enzymatic Nucleic Acid
uuuuaggcggaggaaacucccuucaaggacaucguccgggcauauuaa

SEQ ID NO: 5817 - RNA, 48 nt, Artificial Sequence
  Description of Artificial Sequence:  Enzymatic Nucleic Acid
auaguuguggaggaaacucccuucaaggacaucguccgggugauuuuu

SEQ ID NO: 5818 - RNA, 48 nt, Artificial Sequence
  Description of Artificial Sequence:  Enzymatic Nucleic Acid
ugugaaacggaggaaacucccuucaaggacaucguccgggacaauagu

SEQ ID NO: 5819 - RNA, 48 nt, Artificial Sequence
  Description of Artificial Sequence:  Enzymatic Nucleic Acid
uucucgccggaggaaacucccuucaaggacaucguccgggaaaaguaa

SEQ ID NO: 5820 - RNA, 48 nt, Artificial Sequence
  Description of Artificial Sequence:  Enzymatic Nucleic Acid
uuucucgcggaggaaacucccuucaaggacaucguccgggcaaaagua

SEQ ID NO: 5821 - RNA, 48 nt, Artificial Sequence
  Description of Artificial Sequence:  Enzymatic Nucleic Acid
aacaguuuggaggaaacucccuucaaggacaucguccgggucgcccaa

SEQ ID NO: 5822 - RNA, 48 nt, Artificial Sequence
  Description of Artificial Sequence:  Enzymatic Nucleic Acid
aaagacacggaggaaacucccuucaaggacaucguccgggaaauauuc

SEQ ID NO: 5823 - RNA, 48 nt, Artificial Sequence
  Description of Artificial Sequence:  Enzymatic Nucleic Acid
ccacacucggaggaaacucccuucaaggacaucguccgggaaaagaca

SEQ ID NO: 5824 - RNA, 48 nt, Artificial Sequence
  Description of Artificial Sequence:  Enzymatic Nucleic Acid
uccacacuggaggaaacucccuucaaggacaucguccgggcaaaagac

SEQ ID NO: 5825 - RNA, 48 nt, Artificial Sequence
  Description of Artificial Sequence:  Enzymatic Nucleic Acid
ugcgaaucggaggaaacucccuucaaggacaucguccgggacacucca

SEQ ID NO: 5826 - RNA, 48 nt, Artificial Sequence
  Description of Artificial Sequence:  Enzymatic Nucleic Acid
gugcgaauggaggaaacucccuucaaggacaucguccgggcacacucc

SEQ ID NO: 5827 - RNA, 48 nt, Artificial Sequence
  Description of Artificial Sequence:  Enzymatic Nucleic Acid
uuggugguggaggaaacucccuucaaggacaucguccggguauaugca

SEQ ID NO: 5828 - RNA, 48 nt, Artificial Sequence
  Description of Artificial Sequence:  Enzymatic Nucleic Acid
guaguuucggaggaaacucccuucaaggacaucguccgggggaagugu

SEQ ID NO: 5829 - RNA, 48 nt, Artificial Sequence
  Description of Artificial Sequence:  Enzymatic Nucleic Acid
aguaguuuggaggaaacucccuucaaggacaucguccgggcggaagug

SEQ ID NO: 5830 - RNA, 48 nt, Artificial Sequence
  Description of Artificial Sequence:  Enzymatic Nucleic Acid
cucuucguggaggaaacucccuucaaggacaucguccggguaacaaca

SEQ ID NO: 5831 - RNA, 48 nt, Artificial Sequence
  Description of Artificial Sequence:  Enzymatic Nucleic Acid
accugccuggaggaaacucccuucaaggacaucguccggguucgucua

SEQ ID NO: 5832 - RNA, 48 nt, Artificial Sequence
  Description of Artificial Sequence:  Enzymatic Nucleic Acid
ggaccugcggaggaaacucccuucaaggacaucguccgggucuucguc

SEQ ID NO: 5833 - RNA, 48 nt, Artificial Sequence
  Description of Artificial Sequence:  Enzymatic Nucleic Acid
uaggggacggaggaaacucccuucaaggacaucguccgggugccucuu

SEQ ID NO: 5834 - RNA, 48 nt, Artificial Sequence
  Description of Artificial Sequence:  Enzymatic Nucleic Acid
uucuucuuggaggaaacucccuucaaggacaucguccggguaggggac

SEQ ID NO: 5835 - RNA, 48 nt, Artificial Sequence
  Description of Artificial Sequence:  Enzymatic Nucleic Acid
gaguucuuggaggaaacucccuucaaggacaucguccggguucuaggg

SEQ ID NO: 5836 - RNA, 48 nt, Artificial Sequence
  Description of Artificial Sequence:  Enzymatic Nucleic Acid
agggaguuggaggaaacucccuucaaggacaucguccggguucuucua

SEQ ID NO: 5837 - RNA, 48 nt, Artificial Sequence
  Description of Artificial Sequence:  Enzymatic Nucleic Acid
accuucguggaggaaacucccuucaaggacaucguccgggugcgaggc

SEQ ID NO: 5838 - RNA, 48 nt, Artificial Sequence
  Description of Artificial Sequence:  Enzymatic Nucleic Acid
auugagacggaggaaacucccuucaaggacaucguccggguucgucug

SEQ ID NO: 5839 - RNA, 48 nt, Artificial Sequence
  Description of Artificial Sequence:  Enzymatic Nucleic Acid
gagaucuuggaggaaacucccuucaaggacaucguccgggugcgacgc

SEQ ID NO: 5840 - RNA, 48 nt, Artificial Sequence
  Description of Artificial Sequence:  Enzymatic Nucleic Acid
auugagauggaggaaacucccuucaaggacaucguccggguucugcga

SEQ ID NO: 5841 - RNA, 48 nt, Artificial Sequence
  Description of Artificial Sequence:  Enzymatic Nucleic Acid
gagauuccggaggaaacucccuucaaggacaucguccggggagauuga

SEQ ID NO: 5842 - RNA, 48 nt, Artificial Sequence
  Description of Artificial Sequence:  Enzymatic Nucleic Acid
ugagauucggaggaaacucccuucaaggacaucguccgggcgagauug

SEQ ID NO: 5843 - RNA, 48 nt, Artificial Sequence
  Description of Artificial Sequence:  Enzymatic Nucleic Acid
uugagauuggaggaaacucccuucaaggacaucguccgggccgagauu

SEQ ID NO: 5844 - RNA, 48 nt, Artificial Sequence
  Description of Artificial Sequence:  Enzymatic Nucleic Acid
uaugugucggaggaaacucccuucaaggacaucguccgggaaggaaua

SEQ ID NO: 5845 - RNA, 48 nt, Artificial Sequence
  Description of Artificial Sequence:  Enzymatic Nucleic Acid
uuauguguggaggaaacucccuucaaggacaucguccgggcaaggaau

SEQ ID NO: 5846 - RNA, 48 nt, Artificial Sequence
  Description of Artificial Sequence:  Enzymatic Nucleic Acid
uuucccacggaggaaacucccuucaaggacaucguccggguuaugugu

SEQ ID NO: 5847 - RNA, 48 nt, Artificial Sequence
  Description of Artificial Sequence:  Enzymatic Nucleic Acid
aaguuuccggaggaaacucccuucaaggacaucguccgggaccuuaug

SEQ ID NO: 5848 - RNA, 48 nt, Artificial Sequence
  Description of Artificial Sequence:  Enzymatic Nucleic Acid
aaaguuucggaggaaacucccuucaaggacaucguccgggcaccuuau

SEQ ID NO: 5849 - RNA, 48 nt, Artificial Sequence
  Description of Artificial Sequence:  Enzymatic Nucleic Acid
uaaaguuuggaggaaacucccuucaaggacaucguccgggccaccuua

SEQ ID NO: 5850 - RNA, 48 nt, Artificial Sequence
  Description of Artificial Sequence:  Enzymatic Nucleic Acid
uaaagcccggaggaaacucccuucaaggacaucguccgggguaaaguu

SEQ ID NO: 5851 - RNA, 48 nt, Artificial Sequence
  Description of Artificial Sequence:  Enzymatic Nucleic Acid
auaaagccggaggaaacucccuucaaggacaucguccgggcguaaagu

SEQ ID NO: 5852 - RNA, 48 nt, Artificial Sequence
  Description of Artificial Sequence:  Enzymatic Nucleic Acid
aauaaagcggaggaaacucccuucaaggacaucguccgggccguaaag

SEQ ID NO: 5853 - RNA, 48 nt, Artificial Sequence
  Description of Artificial Sequence:  Enzymatic Nucleic Acid
caagguacggaggaaacucccuucaaggacaucguccgggguagaaga

SEQ ID NO: 5854 - RNA, 48 nt, Artificial Sequence
  Description of Artificial Sequence:  Enzymatic Nucleic Acid
gaguuugcggaggaaacucccuucaaggacaucguccgggauuuagga

SEQ ID NO: 5855 - RNA, 48 nt, Artificial Sequence
  Description of Artificial Sequence:  Enzymatic Nucleic Acid
auguccucggaggaaacucccuucaaggacaucguccgggugcaaaug

SEQ ID NO: 5856 - RNA, 48 nt, Artificial Sequence
  Description of Artificial Sequence:  Enzymatic Nucleic Acid
aauguccuggaggaaacucccuucaaggacaucguccgggcugcaaau

SEQ ID NO: 5857 - RNA, 48 nt, Artificial Sequence
  Description of Artificial Sequence:  Enzymatic Nucleic Acid
acaaugucggaggaaacucccuucaaggacaucguccggguccugcaa

SEQ ID NO: 5858 - RNA, 48 nt, Artificial Sequence
  Description of Artificial Sequence:  Enzymatic Nucleic Acid
aacaauguggaggaaacucccuucaaggacaucguccgggcuccugca

SEQ ID NO: 5859 - RNA, 48 nt, Artificial Sequence
  Description of Artificial Sequence:  Enzymatic Nucleic Acid
gcuuacauggaggaaacucccuucaaggacaucguccggguaucaaca

SEQ ID NO: 5860 - RNA, 48 nt, Artificial Sequence
  Description of Artificial Sequence:  Enzymatic Nucleic Acid
aggggcccggaggaaacucccuucaaggacaucguccgggacaaauug

SEQ ID NO: 5861 - RNA, 48 nt, Artificial Sequence
  Description of Artificial Sequence:  Enzymatic Nucleic Acid
aaggggccggaggaaacucccuucaaggacaucguccgggcacaaauu

SEQ ID NO: 5862 - RNA, 48 nt, Artificial Sequence
  Description of Artificial Sequence:  Enzymatic Nucleic Acid
uaaggggcggaggaaacucccuucaaggacaucguccgggccacaaau

SEQ ID NO: 5863 - RNA, 48 nt, Artificial Sequence
  Description of Artificial Sequence:  Enzymatic Nucleic Acid
uaagucucggaggaaacucccuucaaggacaucguccggguguuuuca

SEQ ID NO: 5864 - RNA, 48 nt, Artificial Sequence
  Description of Artificial Sequence:  Enzymatic Nucleic Acid
uuaagucuggaggaaacucccuucaaggacaucguccgggcuguuuuc

SEQ ID NO: 5865 - RNA, 48 nt, Artificial Sequence
  Description of Artificial Sequence:  Enzymatic Nucleic Acid
auuuaaguggaggaaacucccuucaaggacaucguccggguccuguuu

SEQ ID NO: 5866 - RNA, 48 nt, Artificial Sequence
  Description of Artificial Sequence:  Enzymatic Nucleic Acid
gauaaaacggaggaaacucccuucaaggacaucguccggguagcaggc

SEQ ID NO: 5867 - RNA, 48 nt, Artificial Sequence
  Description of Artificial Sequence:  Enzymatic Nucleic Acid
cccuuuauggaggaaacucccuucaaggacaucguccggguaagggca

SEQ ID NO: 5868 - RNA, 48 nt, Artificial Sequence
  Description of Artificial Sequence:  Enzymatic Nucleic Acid
uuugauccggaggaaacucccuucaaggacaucguccggguuuaucua

SEQ ID NO: 5869 - RNA, 48 nt, Artificial Sequence
  Description of Artificial Sequence:  Enzymatic Nucleic Acid
guuugaucggaggaaacucccuucaaggacaucguccgggcuuuaucu

SEQ ID NO: 5870 - RNA, 48 nt, Artificial Sequence
  Description of Artificial Sequence:  Enzymatic Nucleic Acid
gguuugauggaggaaacucccuucaaggacaucguccgggccuuuauc

SEQ ID NO: 5871 - RNA, 48 nt, Artificial Sequence
  Description of Artificial Sequence:  Enzymatic Nucleic Acid
uacauacuggaggaaacucccuucaaggacaucguccggguggauaau

SEQ ID NO: 5872 - RNA, 48 nt, Artificial Sequence
  Description of Artificial Sequence:  Enzymatic Nucleic Acid
ugucgcguggaggaaacucccuucaaggacaucguccggguggaagua

SEQ ID NO: 5873 - RNA, 48 nt, Artificial Sequence
  Description of Artificial Sequence:  Enzymatic Nucleic Acid
ccgccuucggaggaaacucccuucaaggacaucguccgggaaagagug

SEQ ID NO: 5874 - RNA, 48 nt, Artificial Sequence
  Description of Artificial Sequence:  Enzymatic Nucleic Acid
cccgccuuggaggaaacucccuucaaggacaucguccgggcaaagagu

SEQ ID NO: 5875 - RNA, 48 nt, Artificial Sequence
  Description of Artificial Sequence:  Enzymatic Nucleic Acid
auccccgcggaggaaacucccuucaaggacaucguccggguuccaaag

SEQ ID NO: 5876 - RNA, 48 nt, Artificial Sequence
  Description of Artificial Sequence:  Enzymatic Nucleic Acid
aagaucccggaggaaacucccuucaaggacaucguccggggccuucca

SEQ ID NO: 5877 - RNA, 48 nt, Artificial Sequence
  Description of Artificial Sequence:  Enzymatic Nucleic Acid
uaagauccggaggaaacucccuucaaggacaucguccgggcgccuucc

SEQ ID NO: 5878 - RNA, 48 nt, Artificial Sequence
  Description of Artificial Sequence:  Enzymatic Nucleic Acid
auaagaucggaggaaacucccuucaaggacaucguccgggccgccuuc

SEQ ID NO: 5879 - RNA, 48 nt, Artificial Sequence
  Description of Artificial Sequence:  Enzymatic Nucleic Acid
uauaagauggaggaaacucccuucaaggacaucguccgggcccgccuu

SEQ ID NO: 5880 - RNA, 48 nt, Artificial Sequence
  Description of Artificial Sequence:  Enzymatic Nucleic Acid
uggacucuggaggaaacucccuucaaggacaucguccggguuuuauau

SEQ ID NO: 5881 - RNA, 48 nt, Artificial Sequence
  Description of Artificial Sequence:  Enzymatic Nucleic Acid
uguggacuggaggaaacucccuucaaggacaucguccgggucuuuuau

SEQ ID NO: 5882 - RNA, 48 nt, Artificial Sequence
  Description of Artificial Sequence:  Enzymatic Nucleic Acid
uggugaccggaggaaacucccuucaaggacaucguccggggcaaaaug

SEQ ID NO: 5883 - RNA, 48 nt, Artificial Sequence
  Description of Artificial Sequence:  Enzymatic Nucleic Acid
auggugacggaggaaacucccuucaaggacaucguccgggcgcaaaau

SEQ ID NO: 5884 - RNA, 48 nt, Artificial Sequence
  Description of Artificial Sequence:  Enzymatic Nucleic Acid
cuuguuccggaggaaacucccuucaaggacaucguccgggaagaauau

SEQ ID NO: 5885 - RNA, 48 nt, Artificial Sequence
  Description of Artificial Sequence:  Enzymatic Nucleic Acid
ucuuguucggaggaaacucccuucaaggacaucguccgggcaagaaua

SEQ ID NO: 5886 - RNA, 48 nt, Artificial Sequence
  Description of Artificial Sequence:  Enzymatic Nucleic Acid
aucuuguuggaggaaacucccuucaaggacaucguccgggccaagaau

SEQ ID NO: 5887 - RNA, 48 nt, Artificial Sequence
  Description of Artificial Sequence:  Enzymatic Nucleic Acid
cuguagauggaggaaacucccuucaaggacaucguccggguuguuccc

SEQ ID NO: 5888 - RNA, 48 nt, Artificial Sequence
  Description of Artificial Sequence:  Enzymatic Nucleic Acid
caaccuccggaggaaacucccuucaaggacaucguccgggaugcugua

SEQ ID NO: 5889 - RNA, 48 nt, Artificial Sequence
  Description of Artificial Sequence:  Enzymatic Nucleic Acid
ccaaccucggaggaaacucccuucaaggacaucguccgggcaugcugu

SEQ ID NO: 5890 - RNA, 48 nt, Artificial Sequence
  Description of Artificial Sequence:  Enzymatic Nucleic Acid
accaaccuggaggaaacucccuucaaggacaucguccgggccaugcug

SEQ ID NO: 5891 - RNA, 48 nt, Artificial Sequence
  Description of Artificial Sequence:  Enzymatic Nucleic Acid
agaccaacggaggaaacucccuucaaggacaucguccgggucccaugc

SEQ ID NO: 5892 - RNA, 48 nt, Artificial Sequence
  Description of Artificial Sequence:  Enzymatic Nucleic Acid
uggaagacggaggaaacucccuucaaggacaucguccgggaaccuccc

SEQ ID NO: 5893 - RNA, 48 nt, Artificial Sequence
  Description of Artificial Sequence:  Enzymatic Nucleic Acid
ccccaugcggaggaaacucccuucaaggacaucguccggguuuucgag

SEQ ID NO: 5894 - RNA, 48 nt, Artificial Sequence
  Description of Artificial Sequence:  Enzymatic Nucleic Acid
uuugucccggaggaaacucccuucaaggacaucguccgggaugccuuu

SEQ ID NO: 5895 - RNA, 48 nt, Artificial Sequence
  Description of Artificial Sequence:  Enzymatic Nucleic Acid
auuuguccggaggaaacucccuucaaggacaucguccgggcaugccuu

SEQ ID NO: 5896 - RNA, 48 nt, Artificial Sequence
  Description of Artificial Sequence:  Enzymatic Nucleic Acid
gauuugucggaggaaacucccuucaaggacaucguccgggccaugccu

SEQ ID NO: 5897 - RNA, 48 nt, Artificial Sequence
  Description of Artificial Sequence:  Enzymatic Nucleic Acid
agauuuguggaggaaacucccuucaaggacaucguccgggcccaugcc

SEQ ID NO: 5898 - RNA, 48 nt, Artificial Sequence
  Description of Artificial Sequence:  Enzymatic Nucleic Acid
aagaauccggaggaaacucccuucaaggacaucguccgggaggggauu

SEQ ID NO: 5899 - RNA, 48 nt, Artificial Sequence
  Description of Artificial Sequence:  Enzymatic Nucleic Acid
gaagaaucggaggaaacucccuucaaggacaucguccgggcaggggau

SEQ ID NO: 5900 - RNA, 48 nt, Artificial Sequence
  Description of Artificial Sequence:  Enzymatic Nucleic Acid
ggaagaauggaggaaacucccuucaaggacaucguccgggccagggga

SEQ ID NO: 5901 - RNA, 48 nt, Artificial Sequence
  Description of Artificial Sequence:  Enzymatic Nucleic Acid
gcagggucggaggaaacucccuucaaggacaucguccgggaacugaug

SEQ ID NO: 5902 - RNA, 48 nt, Artificial Sequence
  Description of Artificial Sequence:  Enzymatic Nucleic Acid
ugcaggguggaggaaacucccuucaaggacaucguccgggcaacugau

SEQ ID NO: 5903 - RNA, 48 nt, Artificial Sequence
  Description of Artificial Sequence:  Enzymatic Nucleic Acid
gucccaauggaggaaacucccuucaaggacaucguccggguggauuua

SEQ ID NO: 5904 - RNA, 48 nt, Artificial Sequence
  Description of Artificial Sequence:  Enzymatic Nucleic Acid
ugagguccggaggaaacucccuucaaggacaucguccgggaaucugga

SEQ ID NO: 5905 - RNA, 48 nt, Artificial Sequence
  Description of Artificial Sequence:  Enzymatic Nucleic Acid
uugaggucggaggaaacucccuucaaggacaucguccgggcaaucugg

SEQ ID NO: 5906 - RNA, 48 nt, Artificial Sequence
  Description of Artificial Sequence:  Enzymatic Nucleic Acid
guugagguggaggaaacucccuucaaggacaucguccgggccaaucug

SEQ ID NO: 5907 - RNA, 48 nt, Artificial Sequence
  Description of Artificial Sequence:  Enzymatic Nucleic Acid
caguugucggaggaaacucccuucaaggacaucguccggguugugcgg

SEQ ID NO: 5908 - RNA, 48 nt, Artificial Sequence
  Description of Artificial Sequence:  Enzymatic Nucleic Acid
ccaguuguggaggaaacucccuucaaggacaucguccgggcuugugcg

SEQ ID NO: 5909 - RNA, 48 nt, Artificial Sequence
  Description of Artificial Sequence:  Enzymatic Nucleic Acid
cguccggcggaggaaacucccuucaaggacaucguccgggaguugucc

SEQ ID NO: 5910 - RNA, 48 nt, Artificial Sequence
  Description of Artificial Sequence:  Enzymatic Nucleic Acid
uuggcgucggaggaaacucccuucaaggacaucguccgggggccaguu

SEQ ID NO: 5911 - RNA, 48 nt, Artificial Sequence
  Description of Artificial Sequence:  Enzymatic Nucleic Acid
guuggcguggaggaaacucccuucaaggacaucguccgggcggccagu

SEQ ID NO: 5912 - RNA, 48 nt, Artificial Sequence
  Description of Artificial Sequence:  Enzymatic Nucleic Acid
acucccacggaggaaacucccuucaaggacaucguccggguuguuggc

SEQ ID NO: 5913 - RNA, 48 nt, Artificial Sequence
  Description of Artificial Sequence:  Enzymatic Nucleic Acid
cccacuccggaggaaacucccuucaaggacaucguccgggaccuuguu

SEQ ID NO: 5914 - RNA, 48 nt, Artificial Sequence
  Description of Artificial Sequence:  Enzymatic Nucleic Acid
ucccacucggaggaaacucccuucaaggacaucguccgggcaccuugu

SEQ ID NO: 5915 - RNA, 48 nt, Artificial Sequence
  Description of Artificial Sequence:  Enzymatic Nucleic Acid
cucccacuggaggaaacucccuucaaggacaucguccgggccaccuug

SEQ ID NO: 5916 - RNA, 48 nt, Artificial Sequence
  Description of Artificial Sequence:  Enzymatic Nucleic Acid
aaugcuccggaggaaacucccuucaaggacaucguccgggacucccac

SEQ ID NO: 5917 - RNA, 48 nt, Artificial Sequence
  Description of Artificial Sequence:  Enzymatic Nucleic Acid
gaaugcucggaggaaacucccuucaaggacaucguccgggcacuccca

SEQ ID NO: 5918 - RNA, 48 nt, Artificial Sequence
  Description of Artificial Sequence:  Enzymatic Nucleic Acid
cgaaugcuggaggaaacucccuucaaggacaucguccgggccacuccc

SEQ ID NO: 5919 - RNA, 48 nt, Artificial Sequence
  Description of Artificial Sequence:  Enzymatic Nucleic Acid
cccuggccggaggaaacucccuucaaggacaucguccggggaaugcuc

SEQ ID NO: 5920 - RNA, 48 nt, Artificial Sequence
  Description of Artificial Sequence:  Enzymatic Nucleic Acid
acccuggcggaggaaacucccuucaaggacaucguccgggcgaaugcu

SEQ ID NO: 5921 - RNA, 48 nt, Artificial Sequence
  Description of Artificial Sequence:  Enzymatic Nucleic Acid
ggugaaccggaggaaacucccuucaaggacaucguccggguggcccga

SEQ ID NO: 5922 - RNA, 48 nt, Artificial Sequence
  Description of Artificial Sequence:  Enzymatic Nucleic Acid
gggugaacggaggaaacucccuucaaggacaucguccgggcuggcccg

SEQ ID NO: 5923 - RNA, 48 nt, Artificial Sequence
  Description of Artificial Sequence:  Enzymatic Nucleic Acid
caguccccggaggaaacucccuucaaggacaucguccgggauggggag

SEQ ID NO: 5924 - RNA, 48 nt, Artificial Sequence
  Description of Artificial Sequence:  Enzymatic Nucleic Acid
acagucccggaggaaacucccuucaaggacaucguccgggcaugggga

SEQ ID NO: 5925 - RNA, 48 nt, Artificial Sequence
  Description of Artificial Sequence:  Enzymatic Nucleic Acid
aacaguccggaggaaacucccuucaaggacaucguccgggccaugggg

SEQ ID NO: 5926 - RNA, 48 nt, Artificial Sequence
  Description of Artificial Sequence:  Enzymatic Nucleic Acid
caacagucggaggaaacucccuucaaggacaucguccgggcccauggg

SEQ ID NO: 5927 - RNA, 48 nt, Artificial Sequence
  Description of Artificial Sequence:  Enzymatic Nucleic Acid
ccaacaguggaggaaacucccuucaaggacaucguccgggccccaugg

SEQ ID NO: 5928 - RNA, 48 nt, Artificial Sequence
  Description of Artificial Sequence:  Enzymatic Nucleic Acid
cuccacccggaggaaacucccuucaaggacaucguccgggaacagucc

SEQ ID NO: 5929 - RNA, 48 nt, Artificial Sequence
  Description of Artificial Sequence:  Enzymatic Nucleic Acid
gcuccaccggaggaaacucccuucaaggacaucguccgggcaacaguc

SEQ ID NO: 5930 - RNA, 48 nt, Artificial Sequence
  Description of Artificial Sequence:  Enzymatic Nucleic Acid
ggcuccacggaggaaacucccuucaaggacaucguccgggccaacagu

SEQ ID NO: 5931 - RNA, 48 nt, Artificial Sequence
  Description of Artificial Sequence:  Enzymatic Nucleic Acid
gagggcucggaggaaacucccuucaaggacaucguccgggaccccaac

SEQ ID NO: 5932 - RNA, 48 nt, Artificial Sequence
  Description of Artificial Sequence:  Enzymatic Nucleic Acid
ugagggcuggaggaaacucccuucaaggacaucguccgggcaccccaa

SEQ ID NO: 5933 - RNA, 48 nt, Artificial Sequence
  Description of Artificial Sequence:  Enzymatic Nucleic Acid
aguaggccggaggaaacucccuucaaggacaucguccgggugagcgug

SEQ ID NO: 5934 - RNA, 48 nt, Artificial Sequence
  Description of Artificial Sequence:  Enzymatic Nucleic Acid
gaguaggcggaggaaacucccuucaaggacaucguccgggcugagcgu

SEQ ID NO: 5935 - RNA, 48 nt, Artificial Sequence
  Description of Artificial Sequence:  Enzymatic Nucleic Acid
cugacugcggaggaaacucccuucaaggacaucguccggggauuggug

SEQ ID NO: 5936 - RNA, 48 nt, Artificial Sequence
  Description of Artificial Sequence:  Enzymatic Nucleic Acid
cugccuucggaggaaacucccuucaaggacaucguccgggugacugcc

SEQ ID NO: 5937 - RNA, 48 nt, Artificial Sequence
  Description of Artificial Sequence:  Enzymatic Nucleic Acid
gcugccuuggaggaaacucccuucaaggacaucguccgggcugacugc

SEQ ID NO: 5938 - RNA, 48 nt, Artificial Sequence
  Description of Artificial Sequence:  Enzymatic Nucleic Acid
uaggcugcggaggaaacucccuucaaggacaucguccggguuccugac

SEQ ID NO: 5939 - RNA, 48 nt, Artificial Sequence
  Description of Artificial Sequence:  Enzymatic Nucleic Acid
gaguguccggaggaaacucccuucaaggacaucguccggguuagaggu

SEQ ID NO: 5940 - RNA, 48 nt, Artificial Sequence
  Description of Artificial Sequence:  Enzymatic Nucleic Acid
ugagugucggaggaaacucccuucaaggacaucguccgggcuuagagg

SEQ ID NO: 5941 - RNA, 48 nt, Artificial Sequence
  Description of Artificial Sequence:  Enzymatic Nucleic Acid
augaguguggaggaaacucccuucaaggacaucguccgggccuuagag

SEQ ID NO: 5942 - RNA, 48 nt, Artificial Sequence
  Description of Artificial Sequence:  Enzymatic Nucleic Acid
ugcauggcggaggaaacucccuucaaggacaucguccgggugaggaug

SEQ ID NO: 5943 - RNA, 15 nt, Hepatitis B virus
ccaaaauucgcaguc

SEQ ID NO: 5944 - RNA, 15 nt, Hepatitis B virus
cccaaaucuccaguc

SEQ ID NO: 5945 - RNA, 15 nt, Hepatitis B virus
cuccagucacucacc

SEQ ID NO: 5946 - RNA, 15 nt, Hepatitis B virus
ucuuccucugcaucc

SEQ ID NO: 5947 - RNA, 15 nt, Hepatitis B virus
ucuauguuucccuca

SEQ ID NO: 5948 - RNA, 15 nt, Hepatitis B virus
uuugugucuccucug

SEQ ID NO: 5949 - RNA, 15 nt, Hepatitis B virus
ccucucuuuacgcgg

SEQ ID NO: 5950 - RNA, 15 nt, Hepatitis B virus
aggagguuagguuaa

SEQ ID NO: 5951 - RNA, 15 nt, Hepatitis B virus
auguccuacuguuca

SEQ ID NO: 5952 - RNA, 15 nt, Hepatitis B virus
uucuucuacgguacc

SEQ ID NO: 5953 - RNA, 15 nt, Hepatitis B virus
cuccaccacuuucca

SEQ ID NO: 5954 - RNA, 15 nt, Hepatitis B virus
uccagucacucacca

SEQ ID NO: 5955 - RNA, 15 nt, Hepatitis B virus
gugucuccucugccg

SEQ ID NO: 5956 - RNA, 15 nt, Hepatitis B virus
gaccaccaaaugccc

SEQ ID NO: 5957 - RNA, 16 nt, Hepatitis B virus
ucaccaaccuguuguc

SEQ ID NO: 5958 - RNA, 16 nt, Hepatitis B virus
ccaaccuguuguccuc

SEQ ID NO: 5959 - RNA, 16 nt, Hepatitis B virus
uccgccuauuguaccg

SEQ ID NO: 5960 - RNA, 13 nt, Hepatitis B virus
aauccucacaaua

SEQ ID NO: 5961 - RNA, 13 nt, Hepatitis B virus
gagucuagacucg

SEQ ID NO: 5962 - RNA, 13 nt, Hepatitis B virus
uggacuucucuca

SEQ ID NO: 5963 - RNA, 13 nt, Hepatitis B virus
aauuuucuagggg

SEQ ID NO: 5964 - RNA, 13 nt, Hepatitis B virus
caaaauucgcagu

SEQ ID NO: 5965 - RNA, 13 nt, Hepatitis B virus
ggcguuuuaucau

SEQ ID NO: 5966 - RNA, 13 nt, Hepatitis B virus
uaucaucuuccuc

SEQ ID NO: 5967 - RNA, 13 nt, Hepatitis B virus
uguauucccaucc

SEQ ID NO: 5968 - RNA, 13 nt, Hepatitis B virus
uuuguucaguggu

SEQ ID NO: 5969 - RNA, 13 nt, Hepatitis B virus
ucucuuuacgcgg

SEQ ID NO: 5970 - RNA, 13 nt, Hepatitis B virus
ucaccucugcacg

SEQ ID NO: 5971 - RNA, 13 nt, Hepatitis B virus
gcacgucgcaugg

SEQ ID NO: 5972 - RNA, 13 nt, Hepatitis B virus
ucaccucugccua

SEQ ID NO: 5973 - RNA, 13 nt, Hepatitis B virus
agaacucccucgc

SEQ ID NO: 5974 - RNA, 13 nt, Hepatitis B virus
gaagaucucaauc

SEQ ID NO: 5975 - RNA, 13 nt, Hepatitis B virus
uauucuugggaac

SEQ ID NO: 5976 - RNA, 13 nt, Hepatitis B virus
ugccucaucuucu

SEQ ID NO: 5977 - RNA, 13 nt, Hepatitis B virus
uggcucaguuuac

SEQ ID NO: 5978 - RNA, 13 nt, Hepatitis B virus
guuuacuagugcc

SEQ ID NO: 5979 - RNA, 13 nt, Hepatitis B virus
uuuaccccguugc

SEQ ID NO: 5980 - RNA, 13 nt, Hepatitis B virus
gcaacccccacug

SEQ ID NO: 5981 - RNA, 13 nt, Hepatitis B virus
caacccccacugg

SEQ ID NO: 5982 - RNA, 13 nt, Hepatitis B virus
cggcgcugaaucc

SEQ ID NO: 5983 - RNA, 13 nt, Hepatitis B virus
gaaucccgcggac

SEQ ID NO: 5984 - RNA, 13 nt, Hepatitis B virus
cgcaccucucuuu

SEQ ID NO: 5985 - RNA, 13 nt, Hepatitis B virus
caccucugcacgu

SEQ ID NO: 5986 - RNA, 13 nt, Hepatitis B virus
ccgaccuugaggc

SEQ ID NO: 5987 - RNA, 13 nt, Hepatitis B virus
ggaggcuguaggc

SEQ ID NO: 5988 - RNA, 13 nt, Hepatitis B virus
uuuuucaccucug

SEQ ID NO: 5989 - RNA, 13 nt, Hepatitis B virus
gccuccaagcugu

SEQ ID NO: 5990 - RNA, 13 nt, Hepatitis B virus
ccaagcugugccu

SEQ ID NO: 5991 - RNA, 15 nt, Hepatitis B virus
uuuuucuuguugaca

SEQ ID NO: 5992 - RNA, 15 nt, Hepatitis B virus
cuagacucguggugg

SEQ ID NO: 5993 - RNA, 15 nt, Hepatitis B virus
guggacuucucucaa

SEQ ID NO: 5994 - RNA, 15 nt, Hepatitis B virus
uggacuucucucaau

SEQ ID NO: 5995 - RNA, 15 nt, Hepatitis B virus
gacuucucucaauuu

SEQ ID NO: 5996 - RNA, 15 nt, Hepatitis B virus
cuucucucaauuuuc

SEQ ID NO: 5997 - RNA, 15 nt, Hepatitis B virus
ucucaauuuucuagg

SEQ ID NO: 5998 - RNA, 15 nt, Hepatitis B virus
cucaauuuucuaggg

SEQ ID NO: 5999 - RNA, 15 nt, Hepatitis B virus
ucaauuuucuagggg

SEQ ID NO: 6000 - RNA, 15 nt, Hepatitis B virus
caaaauucgcagucc

SEQ ID NO: 6001 - RNA, 15 nt, Hepatitis B virus
gaugugucugcggcg

SEQ ID NO: 6002 - RNA, 15 nt, Hepatitis B virus
gcggcguuuuaucau

SEQ ID NO: 6003 - RNA, 15 nt, Hepatitis B virus
uuaucaucuuccucu

SEQ ID NO: 6004 - RNA, 15 nt, Hepatitis B virus
ugcugcuaugccuca

SEQ ID NO: 6005 - RNA, 15 nt, Hepatitis B virus
uaugccucaucuucu

SEQ ID NO: 6006 - RNA, 15 nt, Hepatitis B virus
gcucaguuuacuagu

SEQ ID NO: 6007 - RNA, 15 nt, Hepatitis B virus
cucaguuuacuagug

SEQ ID NO: 6008 - RNA, 15 nt, Hepatitis B virus
ucaguuuacuagugc

SEQ ID NO: 6009 - RNA, 15 nt, Hepatitis B virus
guuuacuagugccau

SEQ ID NO: 6010 - RNA, 15 nt, Hepatitis B virus
gugccauuuguucag

SEQ ID NO: 6011 - RNA, 15 nt, Hepatitis B virus
ugccauuuguucagu

SEQ ID NO: 6012 - RNA, 15 nt, Hepatitis B virus
cgcaccucucuuuac

SEQ ID NO: 6013 - RNA, 15 nt, Hepatitis B virus
caccucucuuuacgc

SEQ ID NO: 6014 - RNA, 15 nt, Hepatitis B virus
aggcuguaggcauaa

SEQ ID NO: 6015 - RNA, 15 nt, Hepatitis B virus
uaggcauaaauuggu

SEQ ID NO: 6016 - RNA, 15 nt, Hepatitis B virus
caagccuccaagcug

SEQ ID NO: 6017 - RNA, 15 nt, Hepatitis B virus
ugugccuuggguggc

SEQ ID NO: 6018 - RNA, 15 nt, Hepatitis B virus
aagaacucccucgcc

SEQ ID NO: 6019 - RNA, 15 nt, Hepatitis B virus
accauauucuuggga

SEQ ID NO: 6020 - RNA, 15 nt, Hepatitis B virus
ccauauucuugggaa

SEQ ID NO: 6021 - RNA, 15 nt, Hepatitis B virus
auauucuugggaaca

SEQ ID NO: 6022 - RNA, 15 nt, Hepatitis B virus
ucuagacucguggug

SEQ ID NO: 6023 - RNA, 15 nt, Hepatitis B virus
gguggacuucucuca

SEQ ID NO: 6024 - RNA, 15 nt, Hepatitis B virus
ggacuucucucaauu

SEQ ID NO: 6025 - RNA, 15 nt, Hepatitis B virus
acuucucucaauuuu

SEQ ID NO: 6026 - RNA, 15 nt, Hepatitis B virus
uucucucaauuuucu

SEQ ID NO: 6027 - RNA, 15 nt, Hepatitis B virus
augugucugcggcgu

SEQ ID NO: 6028 - RNA, 15 nt, Hepatitis B virus
auccugcugcuaugc

SEQ ID NO: 6029 - RNA, 15 nt, Hepatitis B virus
cugcugcuaugccuc

SEQ ID NO: 6030 - RNA, 15 nt, Hepatitis B virus
gcuaugccucaucuu

SEQ ID NO: 6031 - RNA, 15 nt, Hepatitus B virus
cuaugccucaucuuc

SEQ ID NO: 6032 - RNA, 15 nt, Hepatitis B virus
augccucaucuucuu

SEQ ID NO: 6033 - RNA, 15 nt, Hepatitis B virus
uguauucccauccca

SEQ ID NO: 6034 - RNA, 15 nt, Hepatitis B virus
guauucccaucccau

SEQ ID NO: 6035 - RNA, 15 nt, Hepatitis B virus
guuucucuuggcuca

SEQ ID NO: 6036 - RNA, 15 nt, Hepatitis B virus
cuagugccauuuguu

SEQ ID NO: 6037 - RNA, 15 nt, Hepatitis B virus
uagugccauuuguuc

SEQ ID NO: 6038 - RNA, 15 nt, Hepatitis B virus
gcuuucccccacugu

SEQ ID NO: 6039 - RNA, 15 nt, Hepatitis B virus
ccuuuaccccguugc

SEQ ID NO: 6040 - RNA, 15 nt, Hepatitis B virus
gcaccucucuuuacg

SEQ ID NO: 6041 - RNA, 15 nt, Hepatitis B virus
accucucuuuacgcg

SEQ ID NO: 6042 - RNA, 15 nt, Hepatitis B virus
uguaggcauaaauug

SEQ ID NO: 6043 - RNA, 15 nt, Hepatitis B virus
uuuucaccucugccu

SEQ ID NO: 6044 - RNA, 15 nt, Hepatitis B virus
uuucaccucugccua

SEQ ID NO: 6045 - RNA, 15 nt, Hepatitis B virus
uucaagccuccaagc

SEQ ID NO: 6046 - RNA, 15 nt, Hepatitis B virus
ucaagccuccaagcu

SEQ ID NO: 6047 - RNA, 15 nt, Hepatitis B virus
aagccuccaagcugu

SEQ ID NO: 6048 - RNA, 15 nt, Hepatitis B virus
agccuccaagcugug

SEQ ID NO: 6049 - RNA, 15 nt, Hepatitis B virus
uccaagcugugccuu

SEQ ID NO: 6050 - RNA, 15 nt, Hepatitis B virus
gaagaacucccucgc

SEQ ID NO: 6051 - RNA, 15 nt, Hepatitis B virus
agaacucccucgccu

SEQ ID NO: 6052 - RNA, 15 nt, Hepatitis B virus
gaacucccucgccuc

SEQ ID NO: 6053 - RNA, 15 nt, Hepatitis B virus
gcgucgcagaagauc

SEQ ID NO: 6054 - RNA, 15 nt, Hepatitis B virus
cauauucuugggaac

SEQ ID NO: 6055 - RNA, 16 nt, Hepatitis B virus
gccaaaauucgcaguc

SEQ ID NO: 6056 - RNA, 16 nt, Hepatitis B virus
aucgcuggaugugucu

SEQ ID NO: 6057 - RNA, 16 nt, Hepatitis B virus
uugcccguuuguccuc

SEQ ID NO: 6058 - RNA, 16 nt, Hepatitis B virus
agugccauuuguucag

SEQ ID NO: 6059 - RNA, 16 nt, Hepatitis B virus
cuccucugccgaucca

SEQ ID NO: 6060 - RNA, 16 nt, Hepatitis B virus
cuucaccucugcacgu

SEQ ID NO: 6061 - RNA, 16 nt, Hepatitis B virus
ccuccaagcugugccu

SEQ ID NO: 6062 - RNA, 16 nt, Hepatitis B virus
uccaagcugugccuug

SEQ ID NO: 6063 - RNA, 16 nt, Hepatitis B virus
gaacucccucgccucg

SEQ ID NO: 6064 - RNA, 15 nt, Hepatitis B virus
gcuggaugugucugc

SEQ ID NO: 6065 - RNA, 15 nt, Hepatitis B virus
cugcggcguuuuauc

SEQ ID NO: 6066 - RNA, 15 nt, Hepatitis B virus
uccugcugcuaugcc

SEQ ID NO: 6067 - RNA, 15 nt, Hepatitis B virus
uaugggagugggccu

SEQ ID NO: 6068 - RNA, 15 nt, Hepatitis B virus
ucguagggcuuuccc

SEQ ID NO: 6069 - RNA, 15 nt, Hepatitis B virus
cuccucugccgaucc

SEQ ID NO: 6070 - RNA, 15 nt, Hepatitis B virus
caccucugccuaauc

SEQ ID NO: 6071 - RNA, 15 nt, Hepatitis B virus
cucccucgccucgca

SEQ ID NO: 6072 - RNA, 15 nt, Hepatitis B virus
gaccccugcucgugu

SEQ ID NO: 6073 - RNA, 15 nt, Hepatitis B virus
ugcucguguuacagg

SEQ ID NO: 6074 - RNA, 15 nt, Hepatitis B virus
aaaauucgcaguccc

SEQ ID NO: 6075 - RNA, 13 nt, Hepatitis B virus
ggaugugucugcg

SEQ ID NO: 6076 - RNA, 15 nt, Hepatitis B virus
uggaugugucugcgg

SEQ ID NO: 6077 - RNA, 13 nt, Hepatitis B virus
gugucugcggcgu

SEQ ID NO: 6078 - RNA, 15 nt, Hepatitis B virus
gucugcggcguuuua

SEQ ID NO: 6079 - RNA, 13 nt, Hepatitis B virus
ugcggcguuuuau

SEQ ID NO: 6080 - RNA, 13 nt, Hepatitis B virus
ugcuaugccucau

SEQ ID NO: 6081 - RNA, 15 nt, Hepatitis B virus
cugcuaugccucauc

SEQ ID NO: 6082 - RNA, 15 nt, Hepatitis B virus
guauguugcccguuu

SEQ ID NO: 6083 - RNA, 15 nt, Hepatitis B virus
cccguuuguccucua

SEQ ID NO: 6084 - RNA, 13 nt, Hepatitis B virus
augggagugggcc

SEQ ID NO: 6085 - RNA, 15 nt, Hepatitis B virus
gccauuuguucagug

SEQ ID NO: 6086 - RNA, 15 nt, Hepatitis B virus
uuguucagugguucg

SEQ ID NO: 6087 - RNA, 13 nt, Hepatitis B virus
uccucugccgauc

SEQ ID NO: 6088 - RNA, 15 nt, Hepatitis B virus
cccgucggcgcugaa

SEQ ID NO: 6089 - RNA, 13 nt, Hepatitis B virus
cacggggcgcacc

SEQ ID NO: 6090 - RNA, 15 nt, Hepatitis B virus
ccacggggcgcaccu

SEQ ID NO: 6091 - RNA, 15 nt, Hepatitis B virus
cccgucugugccuuc

SEQ ID NO: 6092 - RNA, 15 nt, Hepatitis B virus
cgucugugccuucuc

SEQ ID NO: 6093 - RNA, 15 nt, Hepatitis B virus
gcacuucgcuucacc

SEQ ID NO: 6094 - RNA, 13 nt, Hepatitis B virus
accucugccuaau

SEQ ID NO: 6095 - RNA, 15 nt, Hepatitis B virus
accaaaugccccuau

SEQ ID NO: 6096 - RNA, 15 nt, Hepatitis B virus
ccgcgucgcagaaga

SEQ ID NO: 6097 - RNA, 15 nt, Hepatitis B virus
ccugcugguggcucc

SEQ ID NO: 6098 - RNA, 13 nt, Hepatitis B virus
accccugcucgug

SEQ ID NO: 6099 - RNA, 13 nt, Hepatitis B virus
gcucguguuacag

SEQ ID NO: 6100 - RNA, 15 nt, Hepatitis B virus
uagacucguggugga

SEQ ID NO: 6101 - RNA, 15 nt, Hepatitis B virus
acucgugguggacuu

SEQ ID NO: 6102 - RNA, 13 nt, Hepatitis B virus
aaauucgcagucc

SEQ ID NO: 6103 - RNA, 13 nt, Hepatitis B virus
cuggaugugucug

SEQ ID NO: 6104 - RNA, 15 nt, Hepatitis B virus
ugugucugcggcguu

SEQ ID NO: 6105 - RNA, 13 nt, Hepatitis B virus
ucugcggcguuuu

SEQ ID NO: 6106 - RNA, 13 nt, Hepatitis B virus
cauccugcugcua

SEQ ID NO: 6107 - RNA, 13 nt, Hepatitis B virus
ccugcugcuaugc

SEQ ID NO: 6108 - RNA, 13 nt, Hepatitis B virus
uauguugcccguu

SEQ ID NO: 6109 - RNA, 13 nt, Hepatitis B virus
ccguuuguccucu

SEQ ID NO: 6110 - RNA, 13 nt, Hepatitis B virus
ggcucaguuuacu

SEQ ID NO: 6111 - RNA, 15 nt, Hepatitis B virus
uggcucaguuuacua

SEQ ID NO: 6112 - RNA, 13 nt, Hepatitis B virus
uuacuagugccau

SEQ ID NO: 6113 - RNA, 15 nt, Hepatitis B virus
uuuacuagugccauu

SEQ ID NO: 6114 - RNA, 15 nt, Hepatitis B virus
uacuagugccauuug

SEQ ID NO: 6115 - RNA, 13 nt, Hepatitis B virus
uguucagugguuc

SEQ ID NO: 6116 - RNA, 13 nt, Hepatitis B virus
ucagugguucgua

SEQ ID NO: 6117 - RNA, 15 nt, Hepatitis B virus
uucagugguucguag

SEQ ID NO: 6118 - RNA, 13 nt, Hepatitis B virus
cguagggcuuucc

SEQ ID NO: 6119 - RNA, 13 nt, Hepatitis B virus
uugugggucuuuu

SEQ ID NO: 6120 - RNA, 13 nt, Hepatitis B virus
uuucucgccaacu

SEQ ID NO: 6121 - RNA, 15 nt, Hepatitis B virus
cuuucucgccaacuu

SEQ ID NO: 6122 - RNA, 15 nt, Hepatitis B virus
gccaaguguuugcug

SEQ ID NO: 6123 - RNA, 13 nt, Hepatitis B virus
ccgucggcgcuga

SEQ ID NO: 6124 - RNA, 13 nt, Hepatitis B virus
gucggcgcugaau

SEQ ID NO: 6125 - RNA, 15 nt, Hepatitis B virus
cgucggcgcugaauc

SEQ ID NO: 6126 - RNA, 13 nt, Hepatitis B virus
cuccccgucugug

SEQ ID NO: 6127 - RNA, 13 nt, Hepatitis B virus
ccgucugugccuu

SEQ ID NO: 6128 - RNA, 13 nt, Hepatitis B virus
gucugugccuucu

SEQ ID NO: 6129 - RNA, 13 nt, Hepatitis B virus
ccgugugcacuuc

SEQ ID NO: 6130 - RNA, 13 nt, Hepatitis B virus
cacuucgcuucac

SEQ ID NO: 6131 - RNA, 13 nt, Hepatitis B virus
accaccgugaacg

SEQ ID NO: 6132 - RNA, 15 nt, Hepatitis B virus
uguucaagccuccaa

SEQ ID NO: 6133 - RNA, 15 nt, Hepatitis B virus
ccaagcugugccuug

SEQ ID NO: 6134 - RNA, 13 nt, Hepatitis B virus
agcugugccuugg

SEQ ID NO: 6135 - RNA, 15 nt, Hepatitis B virus
aagcugugccuuggg

SEQ ID NO: 6136 - RNA, 13 nt, Hepatitis B virus
ccaaaugccccua

SEQ ID NO: 6137 - RNA, 13 nt, Hepatitis B virus
acuguuguuagac

SEQ ID NO: 6138 - RNA, 13 nt, Hepatitis B virus
aggcagguccccu

SEQ ID NO: 6139 - RNA, 15 nt, Hepatitis B virus
gaggcagguccccua

SEQ ID NO: 6140 - RNA, 13 nt, Hepatitis B virus
ucccucgccucgc

SEQ ID NO: 6141 - RNA, 13 nt, Hepatitis B virus
cgccucgcagacg

SEQ ID NO: 6142 - RNA, 13 nt, Hepatitis B virus
cgccgcgucgcag

SEQ ID NO: 6143 - RNA, 13 nt, Hepatitis B virus
cgcgucgcagaag

SEQ ID NO: 6144 - RNA, 13 nt, Hepatitis B virus
cauaaggugggaa

SEQ ID NO: 6145 - RNA, 15 nt, Hepatitis B virus
uaucgcuggaugugu

SEQ ID NO: 6146 - RNA, 15 nt, Hepatitis B virus
aucgcuggauguguc

SEQ ID NO: 6147 - RNA, 15 nt, Hepatitis B virus
ugggagugggccuca

SEQ ID NO: 6148 - RNA, 13 nt, Hepatitis B virus
gggagugggccuc

SEQ ID NO: 6149 - RNA, 15 nt, Hepatitis B virus
guucagugguucgua

SEQ ID NO: 6150 - RNA, 15 nt, Hepatitis B virus
uucguagggcuuucc

SEQ ID NO: 6151 - RNA, 13 nt, Hepatitis B virus
ccacggggcgcac

SEQ ID NO: 6152 - RNA, 13 nt, Hepatitis B virus
caccgugaacgcc

SEQ ID NO: 6153 - RNA, 13 nt, Hepatitis B virus
cacucaggcaagc

SEQ ID NO: 6154 - RNA, 15 nt, Hepatitis B virus
ccuagaagaagaacu

SEQ ID NO: 6155 - RNA, 15 nt, Hepatitis B virus
auaaggugggaaacu

SEQ ID NO: 6156 - RNA, 13 nt, Hepatitis B virus
gcugguggcucca

SEQ ID NO: 6157 - RNA, 15 nt, Hepatitis B virus
gacucgugguggacu

SEQ ID NO: 6158 - RNA, 15 nt, Hepatitis B virus
ucgugguggacuucu

SEQ ID NO: 6159 - RNA, 13 nt, Hepatitis B virus
aucgcuggaugug

SEQ ID NO: 6160 - RNA, 13 nt, Hepatitis B virus
ucgcuggaugugu

SEQ ID NO: 6161 - RNA, 15 nt, Hepatitis B virus
gggagugggccucag

SEQ ID NO: 6162 - RNA, 15 nt, Hepatitis B virus
guucguagggcuuuc

SEQ ID NO: 6163 - RNA, 13 nt, Hepatitis B virus
ucguagggcuuuc

SEQ ID NO: 6164 - RNA, 15 nt, Hepatitis B virus
uauggaugauguggu

SEQ ID NO: 6165 - RNA, 13 nt, Hepatitis B virus
cuagaagaagaac

SEQ ID NO: 6166 - RNA, 13 nt, Hepatitis B virus
gaagaagaacucc

SEQ ID NO: 6167 - RNA, 15 nt, Hepatitis B virus
cgucgcagaagaucu

SEQ ID NO: 6168 - RNA, 13 nt, Hepatitis B virus
gcagaagaucuca

SEQ ID NO: 6169 - RNA, 15 nt, Hepatitis B virus
cgcagaagaucucaa

SEQ ID NO: 6170 - RNA, 13 nt, Hepatitis B virus
uaaggugggaaac

SEQ ID NO: 6171 - RNA, 15 nt, Hepatitis B virus
uaaggugggaaacuu

SEQ ID NO: 6172 - RNA, 13 nt, Hepatitis B virus
aaggugggaaacu

SEQ ID NO: 6173 - RNA, 15 nt, Hepatitis B virus
ugcacgucgcaugga

SEQ ID NO: 6174 - RNA, 13 nt, Hepatitis B virus
gugccuugggugg

SEQ ID NO: 6175 - RNA, 37 nt, Artificial Sequence
  Description of Artificial Sequence:  Enzymatic Nucleic Acid
  misc_feature (37)..(37): n stands for inverted deoxyabasic derivative
gacugcgcugaugaggccguuaggccgaaauuuuggn

SEQ ID NO: 6176 - RNA, 37 nt, Artificial Sequence
  Description of Artificial Sequence:  Enzymatic Nucleic Acid
  misc_feature (37)..(37): n stands for inverted deoxyabasic derivative
gacuggacugaugaggccguuaggccgaaauuugggn

SEQ ID NO: 6177 - RNA, 37 nt, Artificial Sequence
  Description of Artificial Sequence:  Enzymatic Nucleic Acid
  misc_feature (37)..(37): n stands for inverted deoxyabasic derivative
ggugagucugaugaggccguuaggccgaaacuggagn

SEQ ID NO: 6178 - RNA, 37 nt, Artificial Sequence
  Description of Artificial Sequence:  Enzymatic Nucleic Acid
  misc_feature (37)..(37): n stands for inverted deoxyabasic derivative
ggaugcacugaugaggccguuaggccgaaaggaagan

SEQ ID NO: 6179 - RNA, 37 nt, Artificial Sequence
  Description of Artificial Sequence:  Enzymatic Nucleic Acid
  misc_feature (37)..(37): n stands for inverted deoxyabasic derivative
ugagggacugaugaggccguuaggccgaaacauagan

SEQ ID NO: 6180 - RNA, 37 nt, Artificial Sequence
  Description of Artificial Sequence:  Enzymatic Nucleic Acid
  misc_feature (37)..(37): n stands for inverted deoxyabasic derivative
cagaggacugaugaggccguuaggccgaaacacaaan

SEQ ID NO: 6181 - RNA, 37 nt, Artificial Sequence
  Description of Artificial Sequence:  Enzymatic Nucleic Acid
  misc_feature (37)..(37): n stands for inverted deoxyabasic derivative
ccgcguacugaugaggccguuaggccgaaagagaggn

SEQ ID NO: 6182 - RNA, 37 nt, Artificial Sequence
  Description of Artificial Sequence:  Enzymatic Nucleic Acid
  misc_feature (37)..(37): n stands for inverted deoxyabasic derivative
uuaaccucugaugaggccguuaggccgaaaccuccun

SEQ ID NO: 6183 - RNA, 37 nt, Artificial Sequence
  Description of Artificial Sequence:  Enzymatic Nucleic Acid
  misc_feature (37)..(37): n stands for inverted deoxyabasic derivative
ugaacagcugaugaggccguuaggccgaaaggacaun

SEQ ID NO: 6184 - RNA, 37 nt, Artificial Sequence
  Description of Artificial Sequence:  Enzymatic Nucleic Acid
  misc_feature (37)..(37): n stands for inverted deoxyabasic derivative
gguaccgcugaugaggccguuaggccgaaagaagaan

SEQ ID NO: 6185 - RNA, 37 nt, Artificial Sequence
  Description of Artificial Sequence:  Enzymatic Nucleic Acid
  misc_feature (37)..(37): n stands for inverted deoxyabasic derivative
uggaaagcugaugaggccguuaggccgaagguggagn

SEQ ID NO: 6186 - RNA, 37 nt, Artificial Sequence
  Description of Artificial Sequence:  Enzymatic Nucleic Acid
  misc_feature (37)..(37): n stands for inverted deoxyabasic derivative
uggugagcugaugaggccguuaggccgaagacuggan

SEQ ID NO: 6187 - RNA, 37 nt, Artificial Sequence
  Description of Artificial Sequence:  Enzymatic Nucleic Acid
  misc_feature (37)..(37): n stands for inverted deoxyabasic derivative
cggcagacugaugaggccguuaggccgaagagacacn

SEQ ID NO: 6188 - RNA, 37 nt, Artificial Sequence
  Description of Artificial Sequence:  Enzymatic Nucleic Acid
  misc_feature (37)..(37): n stands for inverted deoxyabasic derivative
gggcauucugaugaggccguuaggccgaagguggucn

SEQ ID NO: 6189 - RNA, 37 nt, Artificial Sequence
  Description of Artificial Sequence:  Enzymatic Nucleic Acid
  misc_feature (37)..(37): n stands for inverted deoxyabasic derivative
gacaaugauggcaugcacuaugcgcgagguuggugan

SEQ ID NO: 6190 - RNA, 37 nt, Artificial Sequence
  Description of Artificial Sequence:  Enzymatic Nucleic Acid
  misc_feature (37)..(37): n stands for inverted deoxyabasic derivative
gaggaugauggcaugcacuaugcgcgaacagguuggn

SEQ ID NO: 6191 - RNA, 37 nt, Artificial Sequence
  Description of Artificial Sequence:  Enzymatic Nucleic Acid
  misc_feature (37)..(37): n stands for inverted deoxyabasic derivative
cgguaugauggcaugcacuaugcgcgaauaggcggan

SEQ ID NO: 6192 - RNA, 35 nt, Artificial Sequence
  Description of Artificial Sequence:  Enzymatic Nucleic Acid
  misc_feature (1)..(4): Phosphorothioate 3'-Internucleotide Linkage
  misc_feature (1)..(7): 2'-O-Methyl
  misc_feature (11)..(11): 2'-O-Methyl
  misc_feature (13)..(25): 2'-O-Methyl
  misc_feature (27)..(28): 2'-O-Methyl
  misc_feature (30)..(34): 2'-O-Methyl
  misc_feature (8)..(8): 2'-deoxy-2'-C-Allyl
  misc_feature (35)..(35): n stands for inverted deoxyabasic derivative
uauugucugaugaggccguuaggccgaaaggauun

SEQ ID NO: 6193 - RNA, 35 nt, Artificial Sequence
  Description of Artificial Sequence:  Enzymatic Nucleic Acid
  misc_feature (1)..(4): Phosphorothioate 3'-Internucleotide Linkage
  misc_feature (1)..(7): 2'-O-Methyl
  misc_feature (11)..(11): 2'-O-Methyl
  misc_feature (13)..(25): 2'-O-Methyl
  misc_feature (27)..(28): 2'-O-Methyl
  misc_feature (30)..(34): 2'-O-Methyl
  misc_feature (8)..(8): 2'-deoxy-2'-C-Allyl
  misc_feature (35)..(35): n stands for inverted deoxyabasic derivative
cgaguccugaugaggccguuaggccgaaagacucn

SEQ ID NO: 6194 - RNA, 35 nt, Artificial Sequence
  Description of Artificial Sequence:  Enzymatic Nucleic Acid
  misc_feature (1)..(4): Phosphorothioate 3'-Internucleotide Linkage
  misc_feature (1)..(7): 2'-O-Methyl
  misc_feature (11)..(11): 2'-O-Methyl
  misc_feature (13)..(25): 2'-O-Methyl
  misc_feature (27)..(28): 2'-O-Methyl
  misc_feature (30)..(34): 2'-O-Methyl
  misc_feature (8)..(8): 2'-deoxy-2'-C-Allyl
  misc_feature (35)..(35): n stands for inverted deoxyabasic derivative
ugagagcugaugaggccguuaggccgaaaguccan

SEQ ID NO: 6195 - RNA, 35 nt, Artificial Sequence
  Description of Artificial Sequence:  Enzymatic Nucleic Acid
  misc_feature (1)..(4): Phosphorothioate 3'-Internucleotide Linkage
  misc_feature (1)..(7): 2'-O-Methyl
  misc_feature (11)..(11): 2'-O-Methyl
  misc_feature (13)..(25): 2'-O-Methyl
  misc_feature (27)..(28): 2'-O-Methyl
  misc_feature (30)..(34): 2'-O-Methyl
  misc_feature (8)..(8): 2'-deoxy-2'-C-Allyl
  misc_feature (35)..(35): n stands for inverted deoxyabasic derivative
ccccuacugaugaggccguuaggccgaaaaaauun

SEQ ID NO: 6196 - RNA, 35 nt, Artificial Sequence
  Description of Artificial Sequence:  Enzymatic Nucleic Acid
  misc_feature (1)..(4): Phosphorothioate 3'-Internucleotide Linkage
  misc_feature (1)..(7): 2'-O-Methyl
  misc_feature (11)..(11): 2'-O-Methyl
  misc_feature (13)..(25): 2'-O-Methyl
  misc_feature (27)..(28): 2'-O-Methyl
  misc_feature (30)..(34): 2'-O-Methyl
  misc_feature (8)..(8): 2'-deoxy-2'-C-Allyl
  misc_feature (35)..(35): n stands for inverted deoxyabasic derivative
acugcgcugaugaggccguuaggccgaaauuuugn

SEQ ID NO: 6197 - RNA, 35 nt, Artificial Sequence
  Description of Artificial Sequence:  Enzymatic Nucleic Acid
  misc_feature (1)..(4): Phosphorothioate 3'-Internucleotide Linkage
  misc_feature (1)..(7): 2'-O-Methyl
  misc_feature (11)..(11): 2'-O-Methyl
  misc_feature (13)..(25): 2'-O-Methyl
  misc_feature (27)..(28): 2'-O-Methyl
  misc_feature (30)..(34): 2'-O-Methyl
  misc_feature (8)..(8): 2'-deoxy-2'-C-Allyl
  misc_feature (35)..(35): n stands for inverted deoxyabasic derivative
augauacugaugaggccguuaggccgaaaacgccn

SEQ ID NO: 6198 - RNA, 35 nt, Artificial Sequence
  Description of Artificial Sequence:  Enzymatic Nucleic Acid
  misc_feature (1)..(4): Phosphorothioate 3'-Internucleotide Linkage
  misc_feature (1)..(7): 2'-O-Methyl
  misc_feature (11)..(11): 2'-O-Methyl
  misc_feature (13)..(25): 2'-O-Methyl
  misc_feature (27)..(28): 2'-O-Methyl
  misc_feature (30)..(34): 2'-O-Methyl
  misc_feature (8)..(8): 2'-deoxy-2'-C-Allyl
  misc_feature (35)..(35): n stands for inverted deoxyabasic derivative
gaggaacugaugaggccguuaggccgaaaugauan

SEQ ID NO: 6199 - RNA, 35 nt, Artificial Sequence
  Description of Artificial Sequence:  Enzymatic Nucleic Acid
  misc_feature (1)..(4): Phosphorothioate 3'-Internucleotide Linkage
  misc_feature (1)..(7): 2'-O-Methyl
  misc_feature (11)..(11): 2'-O-Methyl
  misc_feature (13)..(25): 2'-O-Methyl
  misc_feature (27)..(28): 2'-O-Methyl
  misc_feature (30)..(34): 2'-O-Methyl
  misc_feature (8)..(8): 2'-deoxy-2'-C-Allyl
  misc_feature (35)..(35): n stands for inverted deoxyabasic derivative
ggauggcugaugaggccguuaggccgaaaauacan

SEQ ID NO: 6200 - RNA, 35 nt, Artificial Sequence
  Description of Artificial Sequence:  Enzymatic Nucleic Acid
  misc_feature (1)..(4): Phosphorothioate 3'-Internucleotide Linkage
  misc_feature (1)..(7): 2'-O-Methyl
  misc_feature (11)..(11): 2'-O-Methyl
  misc_feature (13)..(25): 2'-O-Methyl
  misc_feature (27)..(28): 2'-O-Methyl
  misc_feature (30)..(34): 2'-O-Methyl
  misc_feature (8)..(8): 2'-deoxy-2'-C-Allyl
  misc_feature (35)..(35): n stands for inverted deoxyabasic derivative
accacucugaugaggccguuaggccgaaaacaaan

SEQ ID NO: 6201 - RNA, 35 nt, Artificial Sequence
  Description of Artificial Sequence:  Enzymatic Nucleic Acid
  misc_feature (1)..(4): Phosphorothioate 3'-Internucleotide Linkage
  misc_feature (1)..(7): 2'-O-Methyl
  misc_feature (11)..(11): 2'-O-Methyl
  misc_feature (13)..(25): 2'-O-Methyl
  misc_feature (27)..(28): 2'-O-Methyl
  misc_feature (30)..(34): 2'-O-Methyl
  misc_feature (8)..(8): 2'-deoxy-2'-C-Allyl
  misc_feature (35)..(35): n stands for inverted deoxyabasic derivative
ccgcgucugaugaggccguuaggccgaaaagagan

SEQ ID NO: 6202 - RNA, 35 nt, Artificial Sequence
  Description of Artificial Sequence:  Enzymatic Nucleic Acid
  misc_feature (1)..(4): Phosphorothioate 3'-Internucleotide Linkage
  misc_feature (1)..(7): 2'-O-Methyl
  misc_feature (11)..(11): 2'-O-Methyl
  misc_feature (13)..(25): 2'-O-Methyl
  misc_feature (27)..(28): 2'-O-Methyl
  misc_feature (30)..(34): 2'-O-Methyl
  misc_feature (8)..(8): 2'-deoxy-2'-C-Allyl
  misc_feature (35)..(35): n stands for inverted deoxyabasic derivative
cgugcacugaugaggccguuaggccgaaaggugan

SEQ ID NO: 6203 - RNA, 35 nt, Artificial Sequence
  Description of Artificial Sequence:  Enzymatic Nucleic Acid
  misc_feature (1)..(4): Phosphorothioate 3'-Internucleotide Linkage
  misc_feature (1)..(7): 2'-O-Methyl
  misc_feature (11)..(11): 2'-O-Methyl
  misc_feature (13)..(25): 2'-O-Methyl
  misc_feature (27)..(28): 2'-O-Methyl
  misc_feature (30)..(34): 2'-O-Methyl
  misc_feature (8)..(8): 2'-deoxy-2'-C-Allyl
  misc_feature (35)..(35): n stands for inverted deoxyabasic derivative
ccaugccugaugaggccguuaggccgaaacgugcn

SEQ ID NO: 6204 - RNA, 35 nt, Artificial Sequence
  Description of Artificial Sequence:  Enzymatic Nucleic Acid
  misc_feature (1)..(4): Phosphorothioate 3'-Internucleotide Linkage
  misc_feature (1)..(7): 2'-O-Methyl
  misc_feature (11)..(11): 2'-O-Methyl
  misc_feature (13)..(25): 2'-O-Methyl
  misc_feature (27)..(28): 2'-O-Methyl
  misc_feature (30)..(34): 2'-O-Methyl
  misc_feature (8)..(8): 2'-deoxy-2'-C-Allyl
  misc_feature (35)..(35): n stands for inverted deoxyabasic derivative
uaggcacugaugaggccguuaggccgaaaggugan

SEQ ID NO: 6205 - RNA, 35 nt, Artificial Sequence
  Description of Artificial Sequence:  Enzymatic Nucleic Acid
  misc_feature (1)..(4): Phosphorothioate 3'-Internucleotide Linkage
  misc_feature (1)..(7): 2'-O-Methyl
  misc_feature (11)..(11): 2'-O-Methyl
  misc_feature (13)..(25): 2'-O-Methyl
  misc_feature (27)..(28): 2'-O-Methyl
  misc_feature (30)..(34): 2'-O-Methyl
  misc_feature (8)..(8): 2'-deoxy-2'-C-Allyl
  misc_feature (35)..(35): n stands for inverted deoxyabasic derivative
gcgaggcugaugaggccguuaggccgaaaguucun

SEQ ID NO: 6206 - RNA, 35 nt, Artificial Sequence
  Description of Artificial Sequence:  Enzymatic Nucleic Acid
  misc_feature (1)..(4): Phosphorothioate 3'-Internucleotide Linkage
  misc_feature (1)..(7): 2'-O-Methyl
  misc_feature (11)..(11): 2'-O-Methyl
  misc_feature (13)..(25): 2'-O-Methyl
  misc_feature (27)..(28): 2'-O-Methyl
  misc_feature (30)..(34): 2'-O-Methyl
  misc_feature (8)..(8): 2'-deoxy-2'-C-Allyl
  misc_feature (35)..(35): n stands for inverted deoxyabasic derivative
gauugacugaugaggccguuaggccgaaaucuucn

SEQ ID NO: 6207 - RNA, 35 nt, Artificial Sequence
  Description of Artificial Sequence:  Enzymatic Nucleic Acid
  misc_feature (1)..(4): Phosphorothioate 3'-Internucleotide Linkage
  misc_feature (1)..(7): 2'-O-Methyl
  misc_feature (11)..(11): 2'-O-Methyl
  misc_feature (13)..(25): 2'-O-Methyl
  misc_feature (27)..(28): 2'-O-Methyl
  misc_feature (30)..(34): 2'-O-Methyl
  misc_feature (8)..(8): 2'-deoxy-2'-C-Allyl
  misc_feature (35)..(35): n stands for inverted deoxyabasic derivative
guuccccugaugaggccguuaggccgaaagaauan

SEQ ID NO: 6208 - RNA, 35 nt, Artificial Sequence
  Description of Artificial Sequence:  Enzymatic Nucleic Acid
  misc_feature (1)..(4): Phosphorothioate 3'-Internucleotide Linkage
  misc_feature (1)..(7): 2'-O-Methyl
  misc_feature (11)..(11): 2'-O-Methyl
  misc_feature (13)..(25): 2'-O-Methyl
  misc_feature (27)..(28): 2'-O-Methyl
  misc_feature (30)..(34): 2'-O-Methyl
  misc_feature (8)..(8): 2'-deoxy-2'-C-Allyl
  misc_feature (29)..(29): n stands for inosine
  misc_feature (35)..(35): n stands for inverted deoxyabasic derivative
agaagacugaugaggccguuaggccgaanaggcan

SEQ ID NO: 6209 - RNA, 35 nt, Artificial Sequence
  Description of Artificial Sequence:  Enzymatic Nucleic Acid
  misc_feature (1)..(4): Phosphorothioate 3'-Internucleotide Linkage
  misc_feature (1)..(7): 2'-O-Methyl
  misc_feature (11)..(11): 2'-O-Methyl
  misc_feature (13)..(25): 2'-O-Methyl
  misc_feature (27)..(28): 2'-O-Methyl
  misc_feature (30)..(34): 2'-O-Methyl
  misc_feature (8)..(8): 2'-deoxy-2'-C-Allyl
  misc_feature (29)..(29): n stands for inosine
  misc_feature (35)..(35): n stands for inverted deoxyabasic derivative
guaaaccugaugaggccguuaggccgaanagccan

SEQ ID NO: 6210 - RNA, 35 nt, Artificial Sequence
  Description of Artificial Sequence:  Enzymatic Nucleic Acid
  misc_feature (1)..(4): Phosphorothioate 3'-Internucleotide Linkage
  misc_feature (1)..(7): 2'-O-Methyl
  misc_feature (11)..(11): 2'-O-Methyl
  misc_feature (13)..(25): 2'-O-Methyl
  misc_feature (27)..(28): 2'-O-Methyl
  misc_feature (30)..(34): 2'-O-Methyl
  misc_feature (8)..(8): 2'-deoxy-2'-C-Allyl
  misc_feature (29)..(29): n stands for inosine
  misc_feature (35)..(35): n stands for inverted deoxyabasic derivative
ggcacucugaugaggccguuaggccgaanuaaacn

SEQ ID NO: 6211 - RNA, 35 nt, Artificial Sequence
  Description of Artificial Sequence:  Enzymatic Nucleic Acid
  misc_feature (1)..(4): Phosphorothioate 3'-Internucleotide Linkage
  misc_feature (1)..(7): 2'-O-Methyl
  misc_feature (11)..(11): 2'-O-Methyl
  misc_feature (13)..(25): 2'-O-Methyl
  misc_feature (27)..(28): 2'-O-Methyl
  misc_feature (30)..(34): 2'-O-Methyl
  misc_feature (8)..(8): 2'-deoxy-2'-C-Allyl
  misc_feature (29)..(29): n stands for inosine
  misc_feature (35)..(35): n stands for inverted deoxyabasic derivative
gcaacgcugaugaggccguuaggccgaanguaaan

SEQ ID NO: 6212 - RNA, 35 nt, Artificial Sequence
  Description of Artificial Sequence:  Enzymatic Nucleic Acid
  misc_feature (1)..(4): Phosphorothioate 3'-Internucleotide Linkage
  misc_feature (1)..(7): 2'-O-Methyl
  misc_feature (11)..(11): 2'-O-Methyl
  misc_feature (13)..(25): 2'-O-Methyl
  misc_feature (27)..(28): 2'-O-Methyl
  misc_feature (30)..(34): 2'-O-Methyl
  misc_feature (8)..(8): 2'-deoxy-2'-C-Allyl
  misc_feature (29)..(29): n stands for inosine
  misc_feature (35)..(35): n stands for inverted deoxyabasic derivative
caguggcugaugaggccguuaggccgaanguugcn

SEQ ID NO: 6213 - RNA, 35 nt, Artificial Sequence
  Description of Artificial Sequence:  Enzymatic Nucleic Acid
  misc_feature (1)..(4): Phosphorothioate 3'-Internucleotide Linkage
  misc_feature (1)..(7): 2'-O-Methyl
  misc_feature (11)..(11): 2'-O-Methyl
  misc_feature (13)..(25): 2'-O-Methyl
  misc_feature (27)..(28): 2'-O-Methyl
  misc_feature (30)..(34): 2'-O-Methyl
  misc_feature (8)..(8): 2'-deoxy-2'-C-Allyl
  misc_feature (29)..(29): n stands for inosine
  misc_feature (35)..(35): n stands for inverted deoxyabasic derivative
ccagugcugaugaggccguuaggccgaangguugn

SEQ ID NO: 6214 - RNA, 35 nt, Artificial Sequence
  Description of Artificial Sequence:  Enzymatic Nucleic Acid
  misc_feature (1)..(4): Phosphorothioate 3'-Internucleotide Linkage
  misc_feature (1)..(7): 2'-O-Methyl
  misc_feature (11)..(11): 2'-O-Methyl
  misc_feature (13)..(25): 2'-O-Methyl
  misc_feature (27)..(28): 2'-O-Methyl
  misc_feature (30)..(34): 2'-O-Methyl
  misc_feature (8)..(8): 2'-deoxy-2'-C-Allyl
  misc_feature (29)..(29): n stands for inosine
  misc_feature (35)..(35): n stands for inverted deoxyabasic derivative
ggauuccugaugaggccguuaggccgaancgccgn

SEQ ID NO: 6215 - RNA, 35 nt, Artificial Sequence
  Description of Artificial Sequence:  Enzymatic Nucleic Acid
  misc_feature (1)..(4): Phosphorothioate 3'-Internucleotide Linkage
  misc_feature (1)..(7): 2'-O-Methyl
  misc_feature (11)..(11): 2'-O-Methyl
  misc_feature (13)..(25): 2'-O-Methyl
  misc_feature (27)..(28): 2'-O-Methyl
  misc_feature (30)..(34): 2'-O-Methyl
  misc_feature (8)..(8): 2'-deoxy-2'-C-Allyl
  misc_feature (29)..(29): n stands for inosine
  misc_feature (35)..(35): n stands for inverted deoxyabasic derivative
guccgccugaugaggccguuaggccgaangauucn

SEQ ID NO: 6216 - RNA, 35 nt, Artificial Sequence
  Description of Artificial Sequence:  Enzymatic Nucleic Acid
  misc_feature (1)..(4): Phosphorothioate 3'-Internucleotide Linkage
  misc_feature (1)..(7): 2'-O-Methyl
  misc_feature (11)..(11): 2'-O-Methyl
  misc_feature (13)..(25): 2'-O-Methyl
  misc_feature (27)..(28): 2'-O-Methyl
  misc_feature (30)..(34): 2'-O-Methyl
  misc_feature (8)..(8): 2'-deoxy-2'-C-Allyl
  misc_feature (29)..(29): n stands for inosine
  misc_feature (35)..(35): n stands for inverted deoxyabasic derivative
aaagagcugaugaggccguuaggccgaangugcgn

SEQ ID NO: 6217 - RNA, 35 nt, Artificial Sequence
  Description of Artificial Sequence:  Enzymatic Nucleic Acid
  misc_feature (1)..(4): Phosphorothioate 3'-Internucleotide Linkage
  misc_feature (1)..(7): 2'-O-Methyl
  misc_feature (11)..(11): 2'-O-Methyl
  misc_feature (13)..(25): 2'-O-Methyl
  misc_feature (27)..(28): 2'-O-Methyl
  misc_feature (30)..(34): 2'-O-Methyl
  misc_feature (8)..(8): 2'-deoxy-2'-C-Allyl
  misc_feature (29)..(29): n stands for inosine
  misc_feature (35)..(35): n stands for inverted deoxyabasic derivative
acgugccugaugaggccguuaggccgaanaggugn

SEQ ID NO: 6218 - RNA, 35 nt, Artificial Sequence
  Description of Artificial Sequence:  Enzymatic Nucleic Acid
  misc_feature (1)..(4): Phosphorothioate 3'-Internucleotide Linkage
  misc_feature (1)..(7): 2'-O-Methyl
  misc_feature (11)..(11): 2'-O-Methyl
  misc_feature (13)..(25): 2'-O-Methyl
  misc_feature (27)..(28): 2'-O-Methyl
  misc_feature (30)..(34): 2'-O-Methyl
  misc_feature (8)..(8): 2'-deoxy-2'-C-Allyl
  misc_feature (29)..(29): n stands for inosine
  misc_feature (35)..(35): n stands for inverted deoxyabasic derivative
gccucacugaugaggccguuaggccgaangucggn

SEQ ID NO: 6219 - RNA, 35 nt, Artificial Sequence
  Description of Artificial Sequence:  Enzymatic Nucleic Acid
  misc_feature (1)..(4): Phosphorothioate 3'-Internucleotide Linkage
  misc_feature (1)..(7): 2'-O-Methyl
  misc_feature (11)..(11): 2'-O-Methyl
  misc_feature (13)..(25): 2'-O-Methyl
  misc_feature (27)..(28): 2'-O-Methyl
  misc_feature (30)..(34): 2'-O-Methyl
  misc_feature (8)..(8): 2'-deoxy-2'-C-Allyl
  misc_feature (29)..(29): n stands for inosine
  misc_feature (35)..(35): n stands for inverted deoxyabasic derivative
gccuaccugaugaggccguuaggccgaanccuccn

SEQ ID NO: 6220 - RNA, 35 nt, Artificial Sequence
  Description of Artificial Sequence:  Enzymatic Nucleic Acid
  misc_feature (1)..(4): Phosphorothioate 3'-Internucleotide Linkage
  misc_feature (1)..(7): 2'-O-Methyl
  misc_feature (11)..(11): 2'-O-Methyl
  misc_feature (13)..(25): 2'-O-Methyl
  misc_feature (27)..(28): 2'-O-Methyl
  misc_feature (30)..(34): 2'-O-Methyl
  misc_feature (8)..(8): 2'-deoxy-2'-C-Allyl
  misc_feature (29)..(29): n stands for inosine
  misc_feature (35)..(35): n stands for inverted deoxyabasic derivative
cagaggcugaugaggccguuaggccgaanaaaaan

SEQ ID NO: 6221 - RNA, 35 nt, Artificial Sequence
  Description of Artificial Sequence:  Enzymatic Nucleic Acid
  misc_feature (1)..(4): Phosphorothioate 3'-Internucleotide Linkage
  misc_feature (1)..(7): 2'-O-Methyl
  misc_feature (11)..(11): 2'-O-Methyl
  misc_feature (13)..(25): 2'-O-Methyl
  misc_feature (27)..(28): 2'-O-Methyl
  misc_feature (30)..(34): 2'-O-Methyl
  misc_feature (8)..(8): 2'-deoxy-2'-C-Allyl
  misc_feature (29)..(29): n stands for inosine
  misc_feature (35)..(35): n stands for inverted deoxyabasic derivative
acagcucugaugaggccguuaggccgaangaggcn

SEQ ID NO: 6222 - RNA, 35 nt, Artificial Sequence
  Description of Artificial Sequence:  Enzymatic Nucleic Acid
  misc_feature (1)..(4): Phosphorothioate 3'-Internucleotide Linkage
  misc_feature (1)..(7): 2'-O-Methyl
  misc_feature (11)..(11): 2'-O-Methyl
  misc_feature (13)..(25): 2'-O-Methyl
  misc_feature (27)..(28): 2'-O-Methyl
  misc_feature (30)..(34): 2'-O-Methyl
  misc_feature (8)..(8): 2'-deoxy-2'-C-Allyl
  misc_feature (29)..(29): n stands for inosine
  misc_feature (35)..(35): n stands for inverted deoxyabasic derivative
aggcaccugaugaggccguuaggccgaancuuggn

SEQ ID NO: 6223 - RNA, 37 nt, Artificial Sequence
  Description of Artificial Sequence:  Enzymatic Nucleic Acid
  misc_feature (1)..(4): Phosphorothioate 3'-Internucleotide Linkage
  misc_feature (1)..(8): 2'-O-Methyl
  misc_feature (12)..(12): 2'-O-Methyl
  misc_feature (14)..(26): 2'-O-Methyl
  misc_feature (28)..(29): 2'-O-Methyl
  misc_feature (31)..(36): 2'-O-Methyl
  misc_feature (9)..(9): 2'-deoxy-2'-C-Allyl
  misc_feature (37)..(37): n stands for inverted deoxyabasic derivative
ugucaaccugaugaggccguuaggccgaaagaaaaan

SEQ ID NO: 6224 - RNA, 37 nt, Artificial Sequence
  Description of Artificial Sequence:  Enzymatic Nucleic Acid
  misc_feature (1)..(4): Phosphorothioate 3'-Internucleotide Linkage
  misc_feature (1)..(8): 2'-O-Methyl
  misc_feature (12)..(12): 2'-O-Methyl
  misc_feature (14)..(26): 2'-O-Methyl
  misc_feature (28)..(29): 2'-O-Methyl
  misc_feature (31)..(36): 2'-O-Methyl
  misc_feature (9)..(9): 2'-deoxy-2'-C-Allyl
  misc_feature (37)..(37): n stands for inverted deoxyabasic derivative
ccaccaccugaugaggccguuaggccgaaagucuagn

SEQ ID NO: 6225 - RNA, 37 nt, Artificial Sequence
  Description of Artificial Sequence:  Enzymatic Nucleic Acid
  misc_feature (1)..(4): Phosphorothioate 3'-Internucleotide Linkage
  misc_feature (1)..(8): 2'-O-Methyl
  misc_feature (12)..(12): 2'-O-Methyl
  misc_feature (14)..(26): 2'-O-Methyl
  misc_feature (28)..(29): 2'-O-Methyl
  misc_feature (31)..(36): 2'-O-Methyl
  misc_feature (9)..(9): 2'-deoxy-2'-C-Allyl
  misc_feature (37)..(37): n stands for inverted deoxyabasic derivative
uugagagcugaugaggccguuaggccgaaaguccacn

SEQ ID NO: 6226 - RNA, 37 nt, Artificial Sequence
  Description of Artificial Sequence:  Enzymatic Nucleic Acid
  misc_feature (1)..(4): Phosphorothioate 3'-Internucleotide Linkage
  misc_feature (1)..(8): 2'-O-Methyl
  misc_feature (12)..(12): 2'-O-Methyl
  misc_feature (14)..(26): 2'-O-Methyl
  misc_feature (28)..(29): 2'-O-Methyl
  misc_feature (31)..(36): 2'-O-Methyl
  misc_feature (9)..(9): 2'-deoxy-2'-C-Allyl
  misc_feature (37)..(37): n stands for inverted deoxyabasic derivative
auugagacugaugaggccguuaggccgaaaaguccan

SEQ ID NO: 6227 - RNA, 37 nt, Artificial Sequence
  Description of Artificial Sequence:  Enzymatic Nucleic Acid
  misc_feature (1)..(4): Phosphorothioate 3'-Internucleotide Linkage
  misc_feature (1)..(8): 2'-O-Methyl
  misc_feature (12)..(12): 2'-O-Methyl
  misc_feature (14)..(26): 2'-O-Methyl
  misc_feature (28)..(29): 2'-O-Methyl
  misc_feature (31)..(36): 2'-O-Methyl
  misc_feature (9)..(9): 2'-deoxy-2'-C-Allyl
  misc_feature (37)..(37): n stands for inverted deoxyabasic derivative
aaauugacugaugaggccguuaggccgaaagaagucn

SEQ ID NO: 6228 - RNA, 37 nt, Artificial Sequence
  Description of Artificial Sequence:  Enzymatic Nucleic Acid
  misc_feature (1)..(4): Phosphorothioate 3'-Internucleotide Linkage
  misc_feature (1)..(8): 2'-O-Methyl
  misc_feature (12)..(12): 2'-O-Methyl
  misc_feature (14)..(26): 2'-O-Methyl
  misc_feature (28)..(29): 2'-O-Methyl
  misc_feature (31)..(36): 2'-O-Methyl
  misc_feature (9)..(9): 2'-deoxy-2'-C-Allyl
  misc_feature (37)..(37): n stands for inverted deoxyabasic derivative
gaaaauucugaugaggccguuaggccgaaagagaagn

SEQ ID NO: 6229 - RNA, 37 nt, Artificial Sequence
  Description of Artificial Sequence:  Enzymatic Nucleic Acid
  misc_feature (1)..(4): Phosphorothioate 3'-Internucleotide Linkage
  misc_feature (1)..(8): 2'-O-Methyl
  misc_feature (12)..(12): 2'-O-Methyl
  misc_feature (14)..(26): 2'-O-Methyl
  misc_feature (28)..(29): 2'-O-Methyl
  misc_feature (31)..(36): 2'-O-Methyl
  misc_feature (9)..(9): 2'-deoxy-2'-C-Allyl
  misc_feature (37)..(37): n stands for inverted deoxyabasic derivative
ccuagaacugaugaggccguuaggccgaaauugagan

SEQ ID NO: 6230 - RNA, 37 nt, Artificial Sequence
  Description of Artificial Sequence:  Enzymatic Nucleic Acid
  misc_feature (1)..(4): Phosphorothioate 3'-Internucleotide Linkage
  misc_feature (1)..(8): 2'-O-Methyl
  misc_feature (12)..(12): 2'-O-Methyl
  misc_feature (14)..(26): 2'-O-Methyl
  misc_feature (28)..(29): 2'-O-Methyl
  misc_feature (31)..(36): 2'-O-Methyl
  misc_feature (9)..(9): 2'-deoxy-2'-C-Allyl
  misc_feature (37)..(37): n stands for inverted deoxyabasic derivative
cccuagacugaugaggccguuaggccgaaaauugagn

SEQ ID NO: 6231 - RNA, 37 nt, Artificial Sequence
  Description of Artificial Sequence:  Enzymatic Nucleic Acid
  misc_feature (1)..(4): Phosphorothioate 3'-Internucleotide Linkage
  misc_feature (1)..(8): 2'-O-Methyl
  misc_feature (12)..(12): 2'-O-Methyl
  misc_feature (14)..(26): 2'-O-Methyl
  misc_feature (28)..(29): 2'-O-Methyl
  misc_feature (31)..(36): 2'-O-Methyl
  misc_feature (9)..(9): 2'-deoxy-2'-C-Allyl
  misc_feature (37)..(37): n stands for inverted deoxyabasic derivative
ccccuagcugaugaggccguuaggccgaaaaauugan

SEQ ID NO: 6232 - RNA, 37 nt, Artificial Sequence
  Description of Artificial Sequence:  Enzymatic Nucleic Acid
  misc_feature (1)..(4): Phosphorothioate 3'-Internucleotide Linkage
  misc_feature (1)..(8): 2'-O-Methyl
  misc_feature (12)..(12): 2'-O-Methyl
  misc_feature (14)..(26): 2'-O-Methyl
  misc_feature (28)..(29): 2'-O-Methyl
  misc_feature (31)..(36): 2'-O-Methyl
  misc_feature (9)..(9): 2'-deoxy-2'-C-Allyl
  misc_feature (37)..(37): n stands for inverted deoxyabasic derivative
ggacugccugaugaggccguuaggccgaaaauuuugn

SEQ ID NO: 6233 - RNA, 37 nt, Artificial Sequence
  Description of Artificial Sequence:  Enzymatic Nucleic Acid
  misc_feature (1)..(4): Phosphorothioate 3'-Internucleotide Linkage
  misc_feature (1)..(8): 2'-O-Methyl
  misc_feature (12)..(12): 2'-O-Methyl
  misc_feature (14)..(26): 2'-O-Methyl
  misc_feature (28)..(29): 2'-O-Methyl
  misc_feature (31)..(36): 2'-O-Methyl
  misc_feature (9)..(9): 2'-deoxy-2'-C-Allyl
  misc_feature (37)..(37): n stands for inverted deoxyabasic derivative
cgccgcacugaugaggccguuaggccgaaacacaucn

SEQ ID NO: 6234 - RNA, 37 nt, Artificial Sequence
  Description of Artificial Sequence:  Enzymatic Nucleic Acid
  misc_feature (1)..(4): Phosphorothioate 3'-Internucleotide Linkage
  misc_feature (1)..(8): 2'-O-Methyl
  misc_feature (12)..(12): 2'-O-Methyl
  misc_feature (14)..(26): 2'-O-Methyl
  misc_feature (28)..(29): 2'-O-Methyl
  misc_feature (31)..(36): 2'-O-Methyl
  misc_feature (9)..(9): 2'-deoxy-2'-C-Allyl
  misc_feature (37)..(37): n stands for inverted deoxyabasic derivative
augauaacugaugaggccguuaggccgaaacgccgcn

SEQ ID NO: 6235 - RNA, 37 nt, Artificial Sequence
  Description of Artificial Sequence:  Enzymatic Nucleic Acid
  misc_feature (1)..(4): Phosphorothioate 3'-Internucleotide Linkage
  misc_feature (1)..(8): 2'-O-Methyl
  misc_feature (12)..(12): 2'-O-Methyl
  misc_feature (14)..(26): 2'-O-Methyl
  misc_feature (28)..(29): 2'-O-Methyl
  misc_feature (31)..(36): 2'-O-Methyl
  misc_feature (9)..(9): 2'-deoxy-2'-C-Allyl
  misc_feature (37)..(37): n stands for inverted deoxyabasic derivative
agaggaacugaugaggccguuaggccgaaaugauaan

SEQ ID NO: 6236 - RNA, 37 nt, Artificial Sequence
  Description of Artificial Sequence:  Enzymatic Nucleic Acid
  misc_feature (1)..(4): Phosphorothioate 3'-Internucleotide Linkage
  misc_feature (1)..(8): 2'-O-Methyl
  misc_feature (12)..(12): 2'-O-Methyl
  misc_feature (14)..(26): 2'-O-Methyl
  misc_feature (28)..(29): 2'-O-Methyl
  misc_feature (31)..(36): 2'-O-Methyl
  misc_feature (9)..(9): 2'-deoxy-2'-C-Allyl
  misc_feature (37)..(37): n stands for inverted deoxyabasic derivative
ugaggcacugaugaggccguuaggccgaaagcagcan

SEQ ID NO: 6237 - RNA, 37 nt, Artificial Sequence
  Description of Artificial Sequence:  Enzymatic Nucleic Acid
  misc_feature (1)..(4): Phosphorothioate 3'-Internucleotide Linkage
  misc_feature (1)..(8): 2'-O-Methyl
  misc_feature (12)..(12): 2'-O-Methyl
  misc_feature (14)..(26): 2'-O-Methyl
  misc_feature (28)..(29): 2'-O-Methyl
  misc_feature (31)..(36): 2'-O-Methyl
  misc_feature (9)..(9): 2'-deoxy-2'-C-Allyl
  misc_feature (37)..(37): n stands for inverted deoxyabasic derivative
agaagaucugaugaggccguuaggccgaaaggcauan

SEQ ID NO: 6238 - RNA, 37 nt, Artificial Sequence
  Description of Artificial Sequence:  Enzymatic Nucleic Acid
  misc_feature (1)..(4): Phosphorothioate 3'-Internucleotide Linkage
  misc_feature (1)..(8): 2'-O-Methyl
  misc_feature (12)..(12): 2'-O-Methyl
  misc_feature (14)..(26): 2'-O-Methyl
  misc_feature (28)..(29): 2'-O-Methyl
  misc_feature (31)..(36): 2'-O-Methyl
  misc_feature (9)..(9): 2'-deoxy-2'-C-Allyl
  misc_feature (37)..(37): n stands for inverted deoxyabasic derivative
acuaguacugaugaggccguuaggccgaaacugagcn

SEQ ID NO: 6239 - RNA, 37 nt, Artificial Sequence
  Description of Artificial Sequence:  Enzymatic Nucleic Acid
  misc_feature (1)..(4): Phosphorothioate 3'-Internucleotide Linkage
  misc_feature (1)..(8): 2'-O-Methyl
  misc_feature (12)..(12): 2'-O-Methyl
  misc_feature (14)..(26): 2'-O-Methyl
  misc_feature (28)..(29): 2'-O-Methyl
  misc_feature (31)..(36): 2'-O-Methyl
  misc_feature (9)..(9): 2'-deoxy-2'-C-Allyl
  misc_feature (37)..(37): n stands for inverted deoxyabasic derivative
cacuagucugaugaggccguuaggccgaaaacugagn

SEQ ID NO: 6240 - RNA, 37 nt, Artificial Sequence
  Description of Artificial Sequence:  Enzymatic Nucleic Acid
  misc_feature (1)..(4): Phosphorothioate 3'-Internucleotide Linkage
  misc_feature (1)..(8): 2'-O-Methyl
  misc_feature (12)..(12): 2'-O-Methyl
  misc_feature (14)..(26): 2'-O-Methyl
  misc_feature (28)..(29): 2'-O-Methyl
  misc_feature (31)..(36): 2'-O-Methyl
  misc_feature (9)..(9): 2'-deoxy-2'-C-Allyl
  misc_feature (37)..(37): n stands for inverted deoxyabasic derivative
gcacuagcugaugaggccguuaggccgaaaaacugan

SEQ ID NO: 6241 - RNA, 37 nt, Artificial Sequence
  Description of Artificial Sequence:  Enzymatic Nucleic Acid
  misc_feature (1)..(4): Phosphorothioate 3'-Internucleotide Linkage
  misc_feature (1)..(8): 2'-O-Methyl
  misc_feature (12)..(12): 2'-O-Methyl
  misc_feature (14)..(26): 2'-O-Methyl
  misc_feature (28)..(29): 2'-O-Methyl
  misc_feature (31)..(36): 2'-O-Methyl
  misc_feature (9)..(9): 2'-deoxy-2'-C-Allyl
  misc_feature (37)..(37): n stands for inverted deoxyabasic derivative
auggcaccugaugaggccguuaggccgaaaguaaacn

SEQ ID NO: 6242 - RNA, 37 nt, Artificial Sequence
  Description of Artificial Sequence:  Enzymatic Nucleic Acid
  misc_feature (1)..(4): Phosphorothioate 3'-Internucleotide Linkage
  misc_feature (1)..(8): 2'-O-Methyl
  misc_feature (12)..(12): 2'-O-Methyl
  misc_feature (14)..(26): 2'-O-Methyl
  misc_feature (28)..(29): 2'-O-Methyl
  misc_feature (31)..(36): 2'-O-Methyl
  misc_feature (9)..(9): 2'-deoxy-2'-C-Allyl
  misc_feature (37)..(37): n stands for inverted deoxyabasic derivative
cugaacacugaugaggccguuaggccgaaauggcacn

SEQ ID NO: 6243 - RNA, 37 nt, Artificial Sequence
  Description of Artificial Sequence:  Enzymatic Nucleic Acid
  misc_feature (1)..(4): Phosphorothioate 3'-Internucleotide Linkage
  misc_feature (1)..(8): 2'-O-Methyl
  misc_feature (12)..(12): 2'-O-Methyl
  misc_feature (14)..(26): 2'-O-Methyl
  misc_feature (28)..(29): 2'-O-Methyl
  misc_feature (31)..(36): 2'-O-Methyl
  misc_feature (9)..(9): 2'-deoxy-2'-C-Allyl
  misc_feature (37)..(37): n stands for inverted deoxyabasic derivative
acugaaccugaugaggccguuaggccgaaaauggcan

SEQ ID NO: 6244 - RNA, 37 nt, Artificial Sequence
  Description of Artificial Sequence:  Enzymatic Nucleic Acid
  misc_feature (1)..(4): Phosphorothioate 3'-Internucleotide Linkage
  misc_feature (1)..(8): 2'-O-Methyl
  misc_feature (12)..(12): 2'-O-Methyl
  misc_feature (14)..(26): 2'-O-Methyl
  misc_feature (28)..(29): 2'-O-Methyl
  misc_feature (31)..(36): 2'-O-Methyl
  misc_feature (9)..(9): 2'-deoxy-2'-C-Allyl
  misc_feature (37)..(37): n stands for inverted deoxyabasic derivative
guaaagacugaugaggccguuaggccgaaaggugcgn

SEQ ID NO: 6245 - RNA, 37 nt, Artificial Sequence
  Description of Artificial Sequence:  Enzymatic Nucleic Acid
  misc_feature (1)..(4): Phosphorothioate 3'-Internucleotide Linkage
  misc_feature (1)..(8): 2'-O-Methyl
  misc_feature (12)..(12): 2'-O-Methyl
  misc_feature (14)..(26): 2'-O-Methyl
  misc_feature (28)..(29): 2'-O-Methyl
  misc_feature (31)..(36): 2'-O-Methyl
  misc_feature (9)..(9): 2'-deoxy-2'-C-Allyl
  misc_feature (37)..(37): n stands for inverted deoxyabasic derivative
gcguaaacugaugaggccguuaggccgaaagaggugn

SEQ ID NO: 6246 - RNA, 37 nt, Artificial Sequence; identical to SEQ ID NO: 6181
  Description of Artificial Sequence:  Enzymatic Nucleic Acid
  misc_feature (1)..(4): Phosphorothioate 3'-Internucleotide Linkage
  misc_feature (1)..(8): 2'-O-Methyl
  misc_feature (12)..(12): 2'-O-Methyl
  misc_feature (14)..(26): 2'-O-Methyl
  misc_feature (28)..(29): 2'-O-Methyl
  misc_feature (31)..(36): 2'-O-Methyl
  misc_feature (9)..(9): 2'-deoxy-2'-C-Allyl
  misc_feature (37)..(37): n stands for inverted deoxyabasic derivative

SEQ ID NO: 6247 - RNA, 37 nt, Artificial Sequence
  Description of Artificial Sequence:  Enzymatic Nucleic Acid
  misc_feature (1)..(4): Phosphorothioate 3'-Internucleotide Linkage
  misc_feature (1)..(8): 2'-O-Methyl
  misc_feature (12)..(12): 2'-O-Methyl
  misc_feature (14)..(26): 2'-O-Methyl
  misc_feature (28)..(29): 2'-O-Methyl
  misc_feature (31)..(36): 2'-O-Methyl
  misc_feature (9)..(9): 2'-deoxy-2'-C-Allyl
  misc_feature (37)..(37): n stands for inverted deoxyabasic derivative
uuaugcccugaugaggccguuaggccgaaacagccun

SEQ ID NO: 6248 - RNA, 37 nt, Artificial Sequence
  Description of Artificial Sequence:  Enzymatic Nucleic Acid
  misc_feature (1)..(4): Phosphorothioate 3'-Internucleotide Linkage
  misc_feature (1)..(8): 2'-O-Methyl
  misc_feature (12)..(12): 2'-O-Methyl
  misc_feature (14)..(26): 2'-O-Methyl
  misc_feature (28)..(29): 2'-O-Methyl
  misc_feature (31)..(36): 2'-O-Methyl
  misc_feature (9)..(9): 2'-deoxy-2'-C-Allyl
  misc_feature (37)..(37): n stands for inverted deoxyabasic derivative
accaauucugaugaggccguuaggccgaaaugccuan

SEQ ID NO: 6249 - RNA, 37 nt, Artificial Sequence
  Description of Artificial Sequence:  Enzymatic Nucleic Acid
  misc_feature (1)..(4): Phosphorothioate 3'-Internucleotide Linkage
  misc_feature (1)..(8): 2'-O-Methyl
  misc_feature (12)..(12): 2'-O-Methyl
  misc_feature (14)..(26): 2'-O-Methyl
  misc_feature (28)..(29): 2'-O-Methyl
  misc_feature (31)..(36): 2'-O-Methyl
  misc_feature (9)..(9): 2'-deoxy-2'-C-Allyl
  misc_feature (37)..(37): n stands for inverted deoxyabasic derivative
cagcuugcugaugaggccguuaggccgaaaggcuugn

SEQ ID NO: 6250 - RNA, 37 nt, Artificial Sequence
  Description of Artificial Sequence:  Enzymatic Nucleic Acid
  misc_feature (1)..(4): Phosphorothioate 3'-Internucleotide Linkage
  misc_feature (1)..(8): 2'-O-Methyl
  misc_feature (12)..(12): 2'-O-Methyl
  misc_feature (14)..(26): 2'-O-Methyl
  misc_feature (28)..(29): 2'-O-Methyl
  misc_feature (31)..(36): 2'-O-Methyl
  misc_feature (9)..(9): 2'-deoxy-2'-C-Allyl
  misc_feature (37)..(37): n stands for inverted deoxyabasic derivative
gccaccccugaugaggccguuaggccgaaaggcacan

SEQ ID NO: 6251 - RNA, 37 nt, Artificial Sequence
  Description of Artificial Sequence:  Enzymatic Nucleic Acid
  misc_feature (1)..(4): Phosphorothioate 3'-Internucleotide Linkage
  misc_feature (1)..(8): 2'-O-Methyl
  misc_feature (12)..(12): 2'-O-Methyl
  misc_feature (14)..(26): 2'-O-Methyl
  misc_feature (28)..(29): 2'-O-Methyl
  misc_feature (31)..(36): 2'-O-Methyl
  misc_feature (9)..(9): 2'-deoxy-2'-C-Allyl
  misc_feature (37)..(37): n stands for inverted deoxyabasic derivative
ggcgaggcugaugaggccguuaggccgaaaguucuun

SEQ ID NO: 6252 - RNA, 37 nt, Artificial Sequence
  Description of Artificial Sequence:  Enzymatic Nucleic Acid
  misc_feature (1)..(4): Phosphorothioate 3'-Internucleotide Linkage
  misc_feature (1)..(8): 2'-O-Methyl
  misc_feature (12)..(12): 2'-O-Methyl
  misc_feature (14)..(26): 2'-O-Methyl
  misc_feature (28)..(29): 2'-O-Methyl
  misc_feature (31)..(36): 2'-O-Methyl
  misc_feature (9)..(9): 2'-deoxy-2'-C-Allyl
  misc_feature (37)..(37): n stands for inverted deoxyabasic derivative
ucccaagcugaugaggccguuaggccgaaauauggun

SEQ ID NO: 6253 - RNA, 37 nt, Artificial Sequence
  Description of Artificial Sequence:  Enzymatic Nucleic Acid
  misc_feature (1)..(4): Phosphorothioate 3'-Internucleotide Linkage
  misc_feature (1)..(8): 2'-O-Methyl
  misc_feature (12)..(12): 2'-O-Methyl
  misc_feature (14)..(26): 2'-O-Methyl
  misc_feature (28)..(29): 2'-O-Methyl
  misc_feature (31)..(36): 2'-O-Methyl
  misc_feature (9)..(9): 2'-deoxy-2'-C-Allyl
  misc_feature (37)..(37): n stands for inverted deoxyabasic derivative
uucccaacugaugaggccguuaggccgaaaauauggn

SEQ ID NO: 6254 - RNA, 37 nt, Artificial Sequence
  Description of Artificial Sequence:  Enzymatic Nucleic Acid
  misc_feature (1)..(4): Phosphorothioate 3'-Internucleotide Linkage
  misc_feature (1)..(8): 2'-O-Methyl
  misc_feature (12)..(12): 2'-O-Methyl
  misc_feature (14)..(26): 2'-O-Methyl
  misc_feature (28)..(29): 2'-O-Methyl
  misc_feature (31)..(36): 2'-O-Methyl
  misc_feature (9)..(9): 2'-deoxy-2'-C-Allyl
  misc_feature (37)..(37): n stands for inverted deoxyabasic derivative
uguuccccugaugaggccguuaggccgaaagaauaun

SEQ ID NO: 6255 - RNA, 37 nt, Artificial Sequence
  Description of Artificial Sequence:  Enzymatic Nucleic Acid
  misc_feature (1)..(4): Phosphorothioate 3'-Internucleotide Linkage
  misc_feature (1)..(8): 2'-O-Methyl
  misc_feature (12)..(12): 2'-O-Methyl
  misc_feature (14)..(26): 2'-O-Methyl
  misc_feature (28)..(29): 2'-O-Methyl
  misc_feature (31)..(36): 2'-O-Methyl
  misc_feature (9)..(9): 2'-deoxy-2'-C-Allyl
  misc_feature (30)..(30): n stands for inosine
  misc_feature (37)..(37): n stands for inverted deoxyabasic derivative
caccacgcugaugaggccguuaggccgaanucuagan

SEQ ID NO: 6256 - RNA, 37 nt, Artificial Sequence
  Description of Artificial Sequence:  Enzymatic Nucleic Acid
  misc_feature (1)..(4): Phosphorothioate 3'-Internucleotide Linkage
  misc_feature (1)..(8): 2'-O-Methyl
  misc_feature (12)..(12): 2'-O-Methyl
  misc_feature (14)..(26): 2'-O-Methyl
  misc_feature (28)..(29): 2'-O-Methyl
  misc_feature (31)..(36): 2'-O-Methyl
  misc_feature (9)..(9): 2'-deoxy-2'-C-Allyl
  misc_feature (30)..(30): n stands for inosine
  misc_feature (37)..(37): n stands for inverted deoxyabasic derivative
ugagagacugaugaggccguuaggccgaanuccaccn

SEQ ID NO: 6257 - RNA, 37 nt, Artificial Sequence
  Description of Artificial Sequence:  Enzymatic Nucleic Acid
  misc_feature (1)..(4): Phosphorothioate 3'-Internucleotide Linkage
  misc_feature (1)..(8): 2'-O-Methyl
  misc_feature (12)..(12): 2'-O-Methyl
  misc_feature (14)..(26): 2'-O-Methyl
  misc_feature (28)..(29): 2'-O-Methyl
  misc_feature (31)..(36): 2'-O-Methyl
  misc_feature (9)..(9): 2'-deoxy-2'-C-Allyl
  misc_feature (30)..(30): n stands for inosine
  misc_feature (37)..(37): n stands for inverted deoxyabasic derivative
aauugagcugaugaggccguuaggccgaanaaguccn

SEQ ID NO: 6258 - RNA, 37 nt, Artificial Sequence
  Description of Artificial Sequence:  Enzymatic Nucleic Acid
  misc_feature (1)..(4): Phosphorothioate 3'-Internucleotide Linkage
  misc_feature (1)..(8): 2'-O-Methyl
  misc_feature (12)..(12): 2'-O-Methyl
  misc_feature (14)..(26): 2'-O-Methyl
  misc_feature (28)..(29): 2'-O-Methyl
  misc_feature (31)..(36): 2'-O-Methyl
  misc_feature (9)..(9): 2'-deoxy-2'-C-Allyl
  misc_feature (30)..(30): n stands for inosine
  misc_feature (37)..(37): n stands for inverted deoxyabasic derivative
aaaauugcugaugaggccguuaggccgaanagaagun

SEQ ID NO: 6259 - RNA, 37 nt, Artificial Sequence
  Description of Artificial Sequence:  Enzymatic Nucleic Acid
  misc_feature (1)..(4): Phosphorothioate 3'-Internucleotide Linkage
  misc_feature (1)..(8): 2'-O-Methyl
  misc_feature (12)..(12): 2'-O-Methyl
  misc_feature (14)..(26): 2'-O-Methyl
  misc_feature (28)..(29): 2'-O-Methyl
  misc_feature (31)..(36): 2'-O-Methyl
  misc_feature (9)..(9): 2'-deoxy-2'-C-Allyl
  misc_feature (30)..(30): n stands for inosine
  misc_feature (37)..(37): n stands for inverted deoxyabasic derivative
agaaaaucugaugaggccguuaggccgaanagagaan

SEQ ID NO: 6260 - RNA, 37 nt, Artificial Sequence
  Description of Artificial Sequence:  Enzymatic Nucleic Acid
  misc_feature (1)..(4): Phosphorothioate 3'-Internucleotide Linkage
  misc_feature (1)..(8): 2'-O-Methyl
  misc_feature (12)..(12): 2'-O-Methyl
  misc_feature (14)..(26): 2'-O-Methyl
  misc_feature (28)..(29): 2'-O-Methyl
  misc_feature (31)..(36): 2'-O-Methyl
  misc_feature (9)..(9): 2'-deoxy-2'-C-Allyl
  misc_feature (30)..(30): n stands for inosine
  misc_feature (37)..(37): n stands for inverted deoxyabasic derivative
acgccgccugaugaggccguuaggccgaanacacaun

SEQ ID NO: 6261 - RNA, 37 nt, Artificial Sequence
  Description of Artificial Sequence:  Enzymatic Nucleic Acid
  misc_feature (1)..(4): Phosphorothioate 3'-Internucleotide Linkage
  misc_feature (1)..(8): 2'-O-Methyl
  misc_feature (12)..(12): 2'-O-Methyl
  misc_feature (14)..(26): 2'-O-Methyl
  misc_feature (28)..(29): 2'-O-Methyl
  misc_feature (31)..(36): 2'-O-Methyl
  misc_feature (9)..(9): 2'-deoxy-2'-C-Allyl
  misc_feature (30)..(30): n stands for inosine
  misc_feature (37)..(37): n stands for inverted deoxyabasic derivative
gcauagccugaugaggccguuaggccgaancaggaun

SEQ ID NO: 6262 - RNA, 37 nt, Artificial Sequence
  Description of Artificial Sequence:  Enzymatic Nucleic Acid
  misc_feature (1)..(4): Phosphorothioate 3'-Internucleotide Linkage
  misc_feature (1)..(8): 2'-O-Methyl
  misc_feature (12)..(12): 2'-O-Methyl
  misc_feature (14)..(26): 2'-O-Methyl
  misc_feature (28)..(29): 2'-O-Methyl
  misc_feature (31)..(36): 2'-O-Methyl
  misc_feature (9)..(9): 2'-deoxy-2'-C-Allyl
  misc_feature (30)..(30): n stands for inosine
  misc_feature (37)..(37): n stands for inverted deoxyabasic derivative
gaggcaucugaugaggccguuaggccgaancagcagn

SEQ ID NO: 6263 - RNA, 37 nt, Artificial Sequence
  Description of Artificial Sequence:  Enzymatic Nucleic Acid
  misc_feature (1)..(4): Phosphorothioate 3'-Internucleotide Linkage
  misc_feature (1)..(8): 2'-O-Methyl
  misc_feature (12)..(12): 2'-O-Methyl
  misc_feature (14)..(26): 2'-O-Methyl
  misc_feature (28)..(29): 2'-O-Methyl
  misc_feature (31)..(36): 2'-O-Methyl
  misc_feature (9)..(9): 2'-deoxy-2'-C-Allyl
  misc_feature (30)..(30): n stands for inosine
  misc_feature (37)..(37): n stands for inverted deoxyabasic derivative
aagaugacugaugaggccguuaggccgaancauagcn

SEQ ID NO: 6264 - RNA, 37 nt, Artificial Sequence
  Description of Artificial Sequence:  Enzymatic Nucleic Acid
  misc_feature (1)..(4): Phosphorothioate 3'-Internucleotide Linkage
  misc_feature (1)..(8): 2'-O-Methyl
  misc_feature (12)..(12): 2'-O-Methyl
  misc_feature (14)..(26): 2'-O-Methyl
  misc_feature (28)..(29): 2'-O-Methyl
  misc_feature (31)..(36): 2'-O-Methyl
  misc_feature (9)..(9): 2'-deoxy-2'-C-Allyl
  misc_feature (30)..(30): n stands for inosine
  misc_feature (37)..(37): n stands for inverted deoxyabasic derivative
gaagaugcugaugaggccguuaggccgaangcauagn

SEQ ID NO: 6265 - RNA, 37 nt, Artificial Sequence
  Description of Artificial Sequence:  Enzymatic Nucleic Acid
  misc_feature (1)..(4): Phosphorothioate 3'-Internucleotide Linkage
  misc_feature (1)..(8): 2'-O-Methyl
  misc_feature (12)..(12): 2'-O-Methyl
  misc_feature (14)..(26): 2'-O-Methyl
  misc_feature (28)..(29): 2'-O-Methyl
  misc_feature (31)..(36): 2'-O-Methyl
  misc_feature (9)..(9): 2'-deoxy-2'-C-Allyl
  misc_feature (30)..(30): n stands for inosine
  misc_feature (37)..(37): n stands for inverted deoxyabasic derivative
aagaagacugaugaggccguuaggccgaanaggcaun

SEQ ID NO: 6266 - RNA, 37 nt, Artificial Sequence
  Description of Artificial Sequence:  Enzymatic Nucleic Acid
  misc_feature (1)..(4): Phosphorothioate 3'-Internucleotide Linkage
  misc_feature (1)..(8): 2'-O-Methyl
  misc_feature (12)..(12): 2'-O-Methyl
  misc_feature (14)..(26): 2'-O-Methyl
  misc_feature (28)..(29): 2'-O-Methyl
  misc_feature (31)..(36): 2'-O-Methyl
  misc_feature (9)..(9): 2'-deoxy-2'-C-Allyl
  misc_feature (30)..(30): n stands for inosine
  misc_feature (37)..(37): n stands for inverted deoxyabasic derivative
ugggaugcugaugaggccguuaggccgaanaauacan

SEQ ID NO: 6267 - RNA, 37 nt, Artificial Sequence
  Description of Artificial Sequence:  Enzymatic Nucleic Acid
  misc_feature (1)..(4): Phosphorothioate 3'-Internucleotide Linkage
  misc_feature (1)..(8): 2'-O-Methyl
  misc_feature (12)..(12): 2'-O-Methyl
  misc_feature (14)..(26): 2'-O-Methyl
  misc_feature (28)..(29): 2'-O-Methyl
  misc_feature (31)..(36): 2'-O-Methyl
  misc_feature (9)..(9): 2'-deoxy-2'-C-Allyl
  misc_feature (30)..(30): n stands for inosine
  misc_feature (37)..(37): n stands for inverted deoxyabasic derivative
augggaucugaugaggccguuaggccgaangaauacn

SEQ ID NO: 6268 - RNA, 37 nt, Artificial Sequence
  Description of Artificial Sequence:  Enzymatic Nucleic Acid
  misc_feature (1)..(4): Phosphorothioate 3'-Internucleotide Linkage
  misc_feature (1)..(8): 2'-O-Methyl
  misc_feature (12)..(12): 2'-O-Methyl
  misc_feature (14)..(26): 2'-O-Methyl
  misc_feature (28)..(29): 2'-O-Methyl
  misc_feature (31)..(36): 2'-O-Methyl
  misc_feature (9)..(9): 2'-deoxy-2'-C-Allyl
  misc_feature (30)..(30): n stands for inosine
  misc_feature (37)..(37): n stands for inverted deoxyabasic derivative
ugagccacugaugaggccguuaggccgaanagaaacn

SEQ ID NO: 6269 - RNA, 37 nt, Artificial Sequence
  Description of Artificial Sequence:  Enzymatic Nucleic Acid
  misc_feature (1)..(4): Phosphorothioate 3'-Internucleotide Linkage
  misc_feature (1)..(8): 2'-O-Methyl
  misc_feature (12)..(12): 2'-O-Methyl
  misc_feature (14)..(26): 2'-O-Methyl
  misc_feature (28)..(29): 2'-O-Methyl
  misc_feature (31)..(36): 2'-O-Methyl
  misc_feature (9)..(9): 2'-deoxy-2'-C-Allyl
  misc_feature (30)..(30): n stands for inosine
  misc_feature (37)..(37): n stands for inverted deoxyabasic derivative
aacaaaucugaugaggccguuaggccgaancacuagn

SEQ ID NO: 6270 - RNA, 37 nt, Artificial Sequence
  Description of Artificial Sequence:  Enzymatic Nucleic Acid
  misc_feature (1)..(4): Phosphorothioate 3'-Internucleotide Linkage
  misc_feature (1)..(8): 2'-O-Methyl
  misc_feature (12)..(12): 2'-O-Methyl
  misc_feature (14)..(26): 2'-O-Methyl
  misc_feature (28)..(29): 2'-O-Methyl
  misc_feature (31)..(36): 2'-O-Methyl
  misc_feature (9)..(9): 2'-deoxy-2'-C-Allyl
  misc_feature (30)..(30): n stands for inosine
  misc_feature (37)..(37): n stands for inverted deoxyabasic derivative
gaacaaacugaugaggccguuaggccgaangcacuan

SEQ ID NO: 6271 - RNA, 37 nt, Artificial Sequence
  Description of Artificial Sequence:  Enzymatic Nucleic Acid
  misc_feature (1)..(4): Phosphorothioate 3'-Internucleotide Linkage
  misc_feature (1)..(8): 2'-O-Methyl
  misc_feature (12)..(12): 2'-O-Methyl
  misc_feature (14)..(26): 2'-O-Methyl
  misc_feature (28)..(29): 2'-O-Methyl
  misc_feature (31)..(36): 2'-O-Methyl
  misc_feature (9)..(9): 2'-deoxy-2'-C-Allyl
  misc_feature (30)..(30): n stands for inosine
  misc_feature (37)..(37): n stands for inverted deoxyabasic derivative
acaguggcugaugaggccguuaggccgaangaaagcn

SEQ ID NO: 6272 - RNA, 37 nt, Artificial Sequence
  Description of Artificial Sequence:  Enzymatic Nucleic Acid
  misc_feature (1)..(4): Phosphorothioate 3'-Internucleotide Linkage
  misc_feature (1)..(8): 2'-O-Methyl
  misc_feature (12)..(12): 2'-O-Methyl
  misc_feature (14)..(26): 2'-O-Methyl
  misc_feature (28)..(29): 2'-O-Methyl
  misc_feature (31)..(36): 2'-O-Methyl
  misc_feature (9)..(9): 2'-deoxy-2'-C-Allyl
  misc_feature (30)..(30): n stands for inosine
  misc_feature (37)..(37): n stands for inverted deoxyabasic derivative
gcaacggcugaugaggccguuaggccgaanuaaaggn

SEQ ID NO: 6273 - RNA, 37 nt, Artificial Sequence
  Description of Artificial Sequence:  Enzymatic Nucleic Acid
  misc_feature (1)..(4): Phosphorothioate 3'-Internucleotide Linkage
  misc_feature (1)..(8): 2'-O-Methyl
  misc_feature (12)..(12): 2'-O-Methyl
  misc_feature (14)..(26): 2'-O-Methyl
  misc_feature (28)..(29): 2'-O-Methyl
  misc_feature (31)..(36): 2'-O-Methyl
  misc_feature (9)..(9): 2'-deoxy-2'-C-Allyl
  misc_feature (30)..(30): n stands for inosine
  misc_feature (37)..(37): n stands for inverted deoxyabasic derivative
cguaaagcugaugaggccguuaggccgaanaggugcn

SEQ ID NO: 6274 - RNA, 37 nt, Artificial Sequence
  Description of Artificial Sequence:  Enzymatic Nucleic Acid
  misc_feature (1)..(4): Phosphorothioate 3'-Internucleotide Linkage
  misc_feature (1)..(8): 2'-O-Methyl
  misc_feature (12)..(12): 2'-O-Methyl
  misc_feature (14)..(26): 2'-O-Methyl
  misc_feature (28)..(29): 2'-O-Methyl
  misc_feature (31)..(36): 2'-O-Methyl
  misc_feature (9)..(9): 2'-deoxy-2'-C-Allyl
  misc_feature (30)..(30): n stands for inosine
  misc_feature (37)..(37): n stands for inverted deoxyabasic derivative
cgcguaacugaugaggccguuaggccgaanagaggun

SEQ ID NO: 6275 - RNA, 37 nt, Artificial Sequence
  Description of Artificial Sequence:  Enzymatic Nucleic Acid
  misc_feature (1)..(4): Phosphorothioate 3'-Internucleotide Linkage
  misc_feature (1)..(8): 2'-O-Methyl
  misc_feature (12)..(12): 2'-O-Methyl
  misc_feature (14)..(26): 2'-O-Methyl
  misc_feature (28)..(29): 2'-O-Methyl
  misc_feature (31)..(36): 2'-O-Methyl
  misc_feature (9)..(9): 2'-deoxy-2'-C-Allyl
  misc_feature (30)..(30): n stands for inosine
  misc_feature (37)..(37): n stands for inverted deoxyabasic derivative
caauuuacugaugaggccguuaggccgaanccuacan

SEQ ID NO: 6276 - RNA, 37 nt, Artificial Sequence
  Description of Artificial Sequence:  Enzymatic Nucleic Acid
  misc_feature (1)..(4): Phosphorothioate 3'-Internucleotide Linkage
  misc_feature (1)..(8): 2'-O-Methyl
  misc_feature (12)..(12): 2'-O-Methyl
  misc_feature (14)..(26): 2'-O-Methyl
  misc_feature (28)..(29): 2'-O-Methyl
  misc_feature (31)..(36): 2'-O-Methyl
  misc_feature (9)..(9): 2'-deoxy-2'-C-Allyl
  misc_feature (30)..(30): n stands for inosine
  misc_feature (37)..(37): n stands for inverted deoxyabasic derivative
aggcagacugaugaggccguuaggccgaanugaaaan

SEQ ID NO: 6277 - RNA, 37 nt, Artificial Sequence
  Description of Artificial Sequence:  Enzymatic Nucleic Acid
  misc_feature (1)..(4): Phosphorothioate 3'-Internucleotide Linkage
  misc_feature (1)..(8): 2'-O-Methyl
  misc_feature (12)..(12): 2'-O-Methyl
  misc_feature (14)..(26): 2'-O-Methyl
  misc_feature (28)..(29): 2'-O-Methyl
  misc_feature (31)..(36): 2'-O-Methyl
  misc_feature (9)..(9): 2'-deoxy-2'-C-Allyl
  misc_feature (30)..(30): n stands for inosine
  misc_feature (37)..(37): n stands for inverted deoxyabasic derivative
uaggcagcugaugaggccguuaggccgaangugaaan

SEQ ID NO: 6278 - RNA, 37 nt, Artificial Sequence
  Description of Artificial Sequence:  Enzymatic Nucleic Acid
  misc_feature (1)..(4): Phosphorothioate 3'-Internucleotide Linkage
  misc_feature (1)..(8): 2'-O-Methyl
  misc_feature (12)..(12): 2'-O-Methyl
  misc_feature (14)..(26): 2'-O-Methyl
  misc_feature (28)..(29): 2'-O-Methyl
  misc_feature (31)..(36): 2'-O-Methyl
  misc_feature (9)..(9): 2'-deoxy-2'-C-Allyl
  misc_feature (30)..(30): n stands for inosine
  misc_feature (37)..(37): n stands for inverted deoxyabasic derivative
gcuuggacugaugaggccguuaggccgaancuugaan

SEQ ID NO: 6279 - RNA, 37 nt, Artificial Sequence
  Description of Artificial Sequence:  Enzymatic Nucleic Acid
  misc_feature (1)..(4): Phosphorothioate 3'-Internucleotide Linkage
  misc_feature (1)..(8): 2'-O-Methyl
  misc_feature (12)..(12): 2'-O-Methyl
  misc_feature (14)..(26): 2'-O-Methyl
  misc_feature (28)..(29): 2'-O-Methyl
  misc_feature (31)..(36): 2'-O-Methyl
  misc_feature (9)..(9): 2'-deoxy-2'-C-Allyl
  misc_feature (30)..(30): n stands for inosine
  misc_feature (37)..(37): n stands for inverted deoxyabasic derivative
agcuuggcugaugaggccguuaggccgaangcuugan

SEQ ID NO: 6280 - RNA, 37 nt, Artificial Sequence
  Description of Artificial Sequence:  Enzymatic Nucleic Acid
  misc_feature (1)..(4): Phosphorothioate 3'-Internucleotide Linkage
  misc_feature (1)..(8): 2'-O-Methyl
  misc_feature (12)..(12): 2'-O-Methyl
  misc_feature (14)..(26): 2'-O-Methyl
  misc_feature (28)..(29): 2'-O-Methyl
  misc_feature (31)..(36): 2'-O-Methyl
  misc_feature (9)..(9): 2'-deoxy-2'-C-Allyl
  misc_feature (30)..(30): n stands for inosine
  misc_feature (37)..(37): n stands for inverted deoxyabasic derivative
acagcuucugaugaggccguuaggccgaanaggcuun

SEQ ID NO: 6281 - RNA, 37 nt, Artificial Sequence
  Description of Artificial Sequence:  Enzymatic Nucleic Acid
  misc_feature (1)..(4): Phosphorothioate 3'-Internucleotide Linkage
  misc_feature (1)..(8): 2'-O-Methyl
  misc_feature (12)..(12): 2'-O-Methyl
  misc_feature (14)..(26): 2'-O-Methyl
  misc_feature (28)..(29): 2'-O-Methyl
  misc_feature (31)..(36): 2'-O-Methyl
  misc_feature (9)..(9): 2'-deoxy-2'-C-Allyl
  misc_feature (30)..(30): n stands for inosine
  misc_feature (37)..(37): n stands for inverted deoxyabasic derivative
cacagcucugaugaggccguuaggccgaangaggcun

SEQ ID NO: 6282 - RNA, 37 nt, Artificial Sequence
  Description of Artificial Sequence:  Enzymatic Nucleic Acid
  misc_feature (1)..(4): Phosphorothioate 3'-Internucleotide Linkage
  misc_feature (1)..(8): 2'-O-Methyl
  misc_feature (12)..(12): 2'-O-Methyl
  misc_feature (14)..(26): 2'-O-Methyl
  misc_feature (28)..(29): 2'-O-Methyl
  misc_feature (31)..(36): 2'-O-Methyl
  misc_feature (9)..(9): 2'-deoxy-2'-C-Allyl
  misc_feature (30)..(30): n stands for inosine
  misc_feature (37)..(37): n stands for inverted deoxyabasic derivative
aaggcaccugaugaggccguuaggccgaancuuggan

SEQ ID NO: 6283 - RNA, 37 nt, Artificial Sequence
  Description of Artificial Sequence:  Enzymatic Nucleic Acid
  misc_feature (1)..(4): Phosphorothioate 3'-Internucleotide Linkage
  misc_feature (1)..(8): 2'-O-Methyl
  misc_feature (12)..(12): 2'-O-Methyl
  misc_feature (14)..(26): 2'-O-Methyl
  misc_feature (28)..(29): 2'-O-Methyl
  misc_feature (31)..(36): 2'-O-Methyl
  misc_feature (9)..(9): 2'-deoxy-2'-C-Allyl
  misc_feature (30)..(30): n stands for inosine
  misc_feature (37)..(37): n stands for inverted deoxyabasic derivative
gcgagggcugaugaggccguuaggccgaanuucuucn

SEQ ID NO: 6284 - RNA, 37 nt, Artificial Sequence
  Description of Artificial Sequence:  Enzymatic Nucleic Acid
  misc_feature (1)..(4): Phosphorothioate 3'-Internucleotide Linkage
  misc_feature (1)..(8): 2'-O-Methyl
  misc_feature (12)..(12): 2'-O-Methyl
  misc_feature (14)..(26): 2'-O-Methyl
  misc_feature (28)..(29): 2'-O-Methyl
  misc_feature (31)..(36): 2'-O-Methyl
  misc_feature (9)..(9): 2'-deoxy-2'-C-Allyl
  misc_feature (30)..(30): n stands for inosine
  misc_feature (37)..(37): n stands for inverted deoxyabasic derivative
aggcgagcugaugaggccguuaggccgaanaguucun

SEQ ID NO: 6285 - RNA, 37 nt, Artificial Sequence
  Description of Artificial Sequence:  Enzymatic Nucleic Acid
  misc_feature (1)..(4): Phosphorothioate 3'-Internucleotide Linkage
  misc_feature (1)..(8): 2'-O-Methyl
  misc_feature (12)..(12): 2'-O-Methyl
  misc_feature (14)..(26): 2'-O-Methyl
  misc_feature (28)..(29): 2'-O-Methyl
  misc_feature (31)..(36): 2'-O-Methyl
  misc_feature (9)..(9): 2'-deoxy-2'-C-Allyl
  misc_feature (30)..(30): n stands for inosine
  misc_feature (37)..(37): n stands for inverted deoxyabasic derivative
gaggcgacugaugaggccguuaggccgaangaguucn

SEQ ID NO: 6286 - RNA, 37 nt, Artificial Sequence
  Description of Artificial Sequence:  Enzymatic Nucleic Acid
  misc_feature (1)..(4): Phosphorothioate 3'-Internucleotide Linkage
  misc_feature (1)..(8): 2'-O-Methyl
  misc_feature (12)..(12): 2'-O-Methyl
  misc_feature (14)..(26): 2'-O-Methyl
  misc_feature (28)..(29): 2'-O-Methyl
  misc_feature (31)..(36): 2'-O-Methyl
  misc_feature (9)..(9): 2'-deoxy-2'-C-Allyl
  misc_feature (30)..(30): n stands for inosine
  misc_feature (37)..(37): n stands for inverted deoxyabasic derivative
gaucuuccugaugaggccguuaggccgaancgacgcn

SEQ ID NO: 6287 - RNA, 37 nt, Artificial Sequence
  Description of Artificial Sequence:  Enzymatic Nucleic Acid
  misc_feature (1)..(4): Phosphorothioate 3'-Internucleotide Linkage
  misc_feature (1)..(8): 2'-O-Methyl
  misc_feature (12)..(12): 2'-O-Methyl
  misc_feature (14)..(26): 2'-O-Methyl
  misc_feature (28)..(29): 2'-O-Methyl
  misc_feature (31)..(36): 2'-O-Methyl
  misc_feature (9)..(9): 2'-deoxy-2'-C-Allyl
  misc_feature (30)..(30): n stands for inosine
  misc_feature (37)..(37): n stands for inverted deoxyabasic derivative
guucccacugaugaggccguuaggccgaanaauaugn

SEQ ID NO: 6288 - RNA, 35 nt, Artificial Sequence; identical to SEQ ID NO: 6192
  Description of Artificial Sequence:  Enzymatic Nucleic Acid
  misc_feature (1)..(4): Phosphorothioate 3'-Internucleotide Linkage
  misc_feature (1)..(7): 2'-O-Methyl
  misc_feature (13)..(25): 2'-O-Methyl
  misc_feature (27)..(28): 2'-O-Methyl
  misc_feature (30)..(34): 2'-O-Methyl
  misc_feature (8)..(8): 2'-deoxy-2'-amino
  misc_feature (11)..(11): 2'-deoxy-2'-amino
  misc_feature (35)..(35): n stands for inverted deoxyabasic derivative

SEQ ID NO: 6289 - RNA, 35 nt, Artificial Sequence; identical to SEQ ID NO: 6193
  Description of Artificial Sequence:  Enzymatic Nucleic Acid
  misc_feature (1)..(4): Phosphorothioate 3'-Internucleotide Linkage
  misc_feature (1)..(7): 2'-O-Methyl
  misc_feature (13)..(25): 2'-O-Methyl
  misc_feature (27)..(28): 2'-O-Methyl
  misc_feature (30)..(34): 2'-O-Methyl
  misc_feature (8)..(8): 2'-deoxy-2'-amino
  misc_feature (11)..(11): 2'-deoxy-2'-amino
  misc_feature (35)..(35): n stands for inverted deoxyabasic derivative

SEQ ID NO: 6290 - RNA, 35 nt, Artificial Sequence; identical to SEQ ID NO: 6194
  Description of Artificial Sequence:  Enzymatic Nucleic Acid
  misc_feature (1)..(4): Phosphorothioate 3'-Internucleotide Linkage
  misc_feature (1)..(7): 2'-O-Methyl
  misc_feature (13)..(25): 2'-O-Methyl
  misc_feature (27)..(28): 2'-O-Methyl
  misc_feature (30)..(34): 2'-O-Methyl
  misc_feature (8)..(8): 2'-deoxy-2'-amino
  misc_feature (11)..(11): 2'-deoxy-2'-amino
  misc_feature (35)..(35): n stands for inverted deoxyabasic derivative

SEQ ID NO: 6291 - RNA, 35 nt, Artificial Sequence; identical to SEQ ID NO: 6195
  Description of Artificial Sequence:  Enzymatic Nucleic Acid
  misc_feature (1)..(4): Phosphorothioate 3'-Internucleotide Linkage
  misc_feature (1)..(7): 2'-O-Methyl
  misc_feature (13)..(25): 2'-O-Methyl
  misc_feature (27)..(28): 2'-O-Methyl
  misc_feature (30)..(34): 2'-O-Methyl
  misc_feature (8)..(8): 2'-deoxy-2'-amino
  misc_feature (11)..(11): 2'-deoxy-2'-amino
  misc_feature (35)..(35): n stands for inverted deoxyabasic derivative

SEQ ID NO: 6292 - RNA, 35 nt, Artificial Sequence; identical to SEQ ID NO: 6196
  Description of Artificial Sequence:  Enzymatic Nucleic Acid
  misc_feature (1)..(4): Phosphorothioate 3'-Internucleotide Linkage
  misc_feature (1)..(7): 2'-O-Methyl
  misc_feature (13)..(25): 2'-O-Methyl
  misc_feature (27)..(28): 2'-O-Methyl
  misc_feature (30)..(34): 2'-O-Methyl
  misc_feature (8)..(8): 2'-deoxy-2'-amino
  misc_feature (11)..(11): 2'-deoxy-2'-amino
  misc_feature (35)..(35): n stands for inverted deoxyabasic derivative

SEQ ID NO: 6293 - RNA, 35 nt, Artificial Sequence; identical to SEQ ID NO: 6197
  Description of Artificial Sequence:  Enzymatic Nucleic Acid
  misc_feature (1)..(4): Phosphorothioate 3'-Internucleotide Linkage
  misc_feature (1)..(7): 2'-O-Methyl
  misc_feature (13)..(25): 2'-O-Methyl
  misc_feature (27)..(28): 2'-O-Methyl
  misc_feature (30)..(34): 2'-O-Methyl
  misc_feature (8)..(8): 2'-deoxy-2'-amino
  misc_feature (11)..(11): 2'-deoxy-2'-amino
  misc_feature (35)..(35): n stands for inverted deoxyabasic derivative

SEQ ID NO: 6294 - RNA, 35 nt, Artificial Sequence; identical to SEQ ID NO: 6198
  Description of Artificial Sequence:  Enzymatic Nucleic Acid
  misc_feature (1)..(4): Phosphorothioate 3'-Internucleotide Linkage
  misc_feature (1)..(7): 2'-O-Methyl
  misc_feature (13)..(25): 2'-O-Methyl
  misc_feature (27)..(28): 2'-O-Methyl
  misc_feature (30)..(34): 2'-O-Methyl
  misc_feature (8)..(8): 2'-deoxy-2'-amino
  misc_feature (11)..(11): 2'-deoxy-2'-amino
  misc_feature (35)..(35): n stands for inverted deoxyabasic derivative

SEQ ID NO: 6295 - RNA, 35 nt, Artificial Sequence; identical to SEQ ID NO: 6199
  Description of Artificial Sequence:  Enzymatic Nucleic Acid
  misc_feature (1)..(4): Phosphorothioate 3'-Internucleotide Linkage
  misc_feature (1)..(7): 2'-O-Methyl
  misc_feature (13)..(25): 2'-O-Methyl
  misc_feature (27)..(28): 2'-O-Methyl
  misc_feature (30)..(34): 2'-O-Methyl
  misc_feature (8)..(8): 2'-deoxy-2'-amino
  misc_feature (11)..(11): 2'-deoxy-2'-amino
  misc_feature (35)..(35): n stands for inverted deoxyabasic derivative

SEQ ID NO: 6296 - RNA, 35 nt, Artificial Sequence; identical to SEQ ID NO: 6200
  Description of Artificial Sequence:  Enzymatic Nucleic Acid
  misc_feature (1)..(4): Phosphorothioate 3'-Internucleotide Linkage
  misc_feature (1)..(7): 2'-O-Methyl
  misc_feature (13)..(25): 2'-O-Methyl
  misc_feature (27)..(28): 2'-O-Methyl
  misc_feature (30)..(34): 2'-O-Methyl
  misc_feature (8)..(8): 2'-deoxy-2'-amino
  misc_feature (11)..(11): 2'-deoxy-2'-amino
  misc_feature (35)..(35): n stands for inverted deoxyabasic derivative

SEQ ID NO: 6297 - RNA, 35 nt, Artificial Sequence; identical to SEQ ID NO: 6201
  Description of Artificial Sequence:  Enzymatic Nucleic Acid
  misc_feature (1)..(4): Phosphorothioate 3'-Internucleotide Linkage
  misc_feature (1)..(7): 2'-O-Methyl
  misc_feature (13)..(25): 2'-O-Methyl
  misc_feature (27)..(28): 2'-O-Methyl
  misc_feature (30)..(34): 2'-O-Methyl
  misc_feature (8)..(8): 2'-deoxy-2'-amino
  misc_feature (11)..(11): 2'-deoxy-2'-amino
  misc_feature (35)..(35): n stands for inverted deoxyabasic derivative

SEQ ID NO: 6298 - RNA, 35 nt, Artificial Sequence; identical to SEQ ID NO: 6202
  Description of Artificial Sequence:  Enzymatic Nucleic Acid
  misc_feature (1)..(4): Phosphorothioate 3'-Internucleotide Linkage
  misc_feature (1)..(7): 2'-O-Methyl
  misc_feature (13)..(25): 2'-O-Methyl
  misc_feature (27)..(28): 2'-O-Methyl
  misc_feature (30)..(34): 2'-O-Methyl
  misc_feature (8)..(8): 2'-deoxy-2'-amino
  misc_feature (11)..(11): 2'-deoxy-2'-amino
  misc_feature (35)..(35): n stands for inverted deoxyabasic derivative

SEQ ID NO: 6299 - RNA, 35 nt, Artificial Sequence; identical to SEQ ID NO: 6203
  Description of Artificial Sequence:  Enzymatic Nucleic Acid
  misc_feature (1)..(4): Phosphorothioate 3'-Internucleotide Linkage
  misc_feature (1)..(7): 2'-O-Methyl
  misc_feature (13)..(25): 2'-O-Methyl
  misc_feature (27)..(28): 2'-O-Methyl
  misc_feature (30)..(34): 2'-O-Methyl
  misc_feature (8)..(8): 2'-deoxy-2'-amino
  misc_feature (11)..(11): 2'-deoxy-2'-amino
  misc_feature (35)..(35): n stands for inverted deoxyabasic derivative

SEQ ID NO: 6300 - RNA, 35 nt, Artificial Sequence; identical to SEQ ID NO: 6204
  Description of Artificial Sequence:  Enzymatic Nucleic Acid
  misc_feature (1)..(4): Phosphorothioate 3'-Internucleotide Linkage
  misc_feature (1)..(7): 2'-O-Methyl
  misc_feature (13)..(25): 2'-O-Methyl
  misc_feature (27)..(28): 2'-O-Methyl
  misc_feature (30)..(34): 2'-O-Methyl
  misc_feature (8)..(8): 2'-deoxy-2'-amino
  misc_feature (11)..(11): 2'-deoxy-2'-amino
  misc_feature (35)..(35): n stands for inverted deoxyabasic derivative

SEQ ID NO: 6301 - RNA, 35 nt, Artificial Sequence; identical to SEQ ID NO: 6205
  Description of Artificial Sequence:  Enzymatic Nucleic Acid
  misc_feature (1)..(4): Phosphorothioate 3'-Internucleotide Linkage
  misc_feature (1)..(7): 2'-O-Methyl
  misc_feature (13)..(25): 2'-O-Methyl
  misc_feature (27)..(28): 2'-O-Methyl
  misc_feature (30)..(34): 2'-O-Methyl
  misc_feature (8)..(8): 2'-deoxy-2'-amino
  misc_feature (11)..(11): 2'-deoxy-2'-amino
  misc_feature (35)..(35): n stands for inverted deoxyabasic derivative

SEQ ID NO: 6302 - RNA, 35 nt, Artificial Sequence; identical to SEQ ID NO: 6206
  Description of Artificial Sequence:  Enzymatic Nucleic Acid
  misc_feature (1)..(4): Phosphorothioate 3'-Internucleotide Linkage
  misc_feature (1)..(7): 2'-O-Methyl
  misc_feature (13)..(25): 2'-O-Methyl
  misc_feature (27)..(28): 2'-O-Methyl
  misc_feature (30)..(34): 2'-O-Methyl
  misc_feature (8)..(8): 2'-deoxy-2'-amino
  misc_feature (11)..(11): 2'-deoxy-2'-amino
  misc_feature (35)..(35): n stands for inverted deoxyabasic derivative

SEQ ID NO: 6303 - RNA, 35 nt, Artificial Sequence; identical to SEQ ID NO: 6207
  Description of Artificial Sequence:  Enzymatic Nucleic Acid
  misc_feature (1)..(4): Phosphorothioate 3'-Internucleotide Linkage
  misc_feature (1)..(7): 2'-O-Methyl
  misc_feature (13)..(25): 2'-O-Methyl
  misc_feature (27)..(28): 2'-O-Methyl
  misc_feature (30)..(34): 2'-O-Methyl
  misc_feature (8)..(8): 2'-deoxy-2'-amino
  misc_feature (11)..(11): 2'-deoxy-2'-amino
  misc_feature (35)..(35): n stands for inverted deoxyabasic derivative

SEQ ID NO: 6304 - RNA, 35 nt, Artificial Sequence; identical to SEQ ID NO: 6208
  Description of Artificial Sequence:  Enzymatic Nucleic Acid
  misc_feature (1)..(4): Phosphorothioate 3'-Internucleotide Linkage
  misc_feature (1)..(7): 2'-O-Methyl
  misc_feature (13)..(25): 2'-O-Methyl
  misc_feature (27)..(28): 2'-O-Methyl
  misc_feature (30)..(34): 2'-O-Methyl
  misc_feature (8)..(8): 2'-deoxy-2'-amino
  misc_feature (11)..(11): 2'-deoxy-2'-amino
  misc_feature (29)..(29): n stands for inosine
  misc_feature (35)..(35): n stands for inverted deoxyabasic derivative

SEQ ID NO: 6305 - RNA, 35 nt, Artificial Sequence; identical to SEQ ID NO: 6209
  Description of Artificial Sequence:  Enzymatic Nucleic Acid
  misc_feature (1)..(4): Phosphorothioate 3'-Internucleotide Linkage
  misc_feature (1)..(7): 2'-O-Methyl
  misc_feature (13)..(25): 2'-O-Methyl
  misc_feature (27)..(28): 2'-O-Methyl
  misc_feature (30)..(34): 2'-O-Methyl
  misc_feature (8)..(8): 2'-deoxy-2'-amino
  misc_feature (11)..(11): 2'-deoxy-2'-amino
  misc_feature (29)..(29): n stands for inosine
  misc_feature (35)..(35): n stands for inverted deoxyabasic derivative

SEQ ID NO: 6306 - RNA, 35 nt, Artificial Sequence; identical to SEQ ID NO: 6210
  Description of Artificial Sequence:  Enzymatic Nucleic Acid
  misc_feature (1)..(4): Phosphorothioate 3'-Internucleotide Linkage
  misc_feature (1)..(7): 2'-O-Methyl
  misc_feature (13)..(25): 2'-O-Methyl
  misc_feature (27)..(28): 2'-O-Methyl
  misc_feature (30)..(34): 2'-O-Methyl
  misc_feature (8)..(8): 2'-deoxy-2'-amino
  misc_feature (11)..(11): 2'-deoxy-2'-amino
  misc_feature (29)..(29): n stands for inosine
  misc_feature (35)..(35): n stands for inverted deoxyabasic derivative

SEQ ID NO: 6307 - RNA, 35 nt, Artificial Sequence; identical to SEQ ID NO: 6211
  Description of Artificial Sequence:  Enzymatic Nucleic Acid
  misc_feature (1)..(4): Phosphorothioate 3'-Internucleotide Linkage
  misc_feature (1)..(7): 2'-O-Methyl
  misc_feature (13)..(25): 2'-O-Methyl
  misc_feature (27)..(28): 2'-O-Methyl
  misc_feature (30)..(34): 2'-O-Methyl
  misc_feature (8)..(8): 2'-deoxy-2'-amino
  misc_feature (11)..(11): 2'-deoxy-2'-amino
  misc_feature (29)..(29): n stands for inosine
  misc_feature (35)..(35): n stands for inverted deoxyabasic derivative

SEQ ID NO: 6308 - RNA, 35 nt, Artificial Sequence; identical to SEQ ID NO: 6212
  Description of Artificial Sequence:  Enzymatic Nucleic Acid
  misc_feature (1)..(4): Phosphorothioate 3'-Internucleotide Linkage
  misc_feature (1)..(7): 2'-O-Methyl
  misc_feature (13)..(25): 2'-O-Methyl
  misc_feature (27)..(28): 2'-O-Methyl
  misc_feature (30)..(34): 2'-O-Methyl
  misc_feature (8)..(8): 2'-deoxy-2'-amino
  misc_feature (11)..(11): 2'-deoxy-2'-amino
  misc_feature (29)..(29): n stands for inosine
  misc_feature (35)..(35): n stands for inverted deoxyabasic derivative

SEQ ID NO: 6309 - RNA, 35 nt, Artificial Sequence; identical to SEQ ID NO: 6213
  Description of Artificial Sequence:  Enzymatic Nucleic Acid
  misc_feature (1)..(4): Phosphorothioate 3'-Internucleotide Linkage
  misc_feature (1)..(7): 2'-O-Methyl
  misc_feature (13)..(25): 2'-O-Methyl
  misc_feature (27)..(28): 2'-O-Methyl
  misc_feature (30)..(34): 2'-O-Methyl
  misc_feature (8)..(8): 2'-deoxy-2'-amino
  misc_feature (11)..(11): 2'-deoxy-2'-amino
  misc_feature (29)..(29): n stands for inosine
  misc_feature (35)..(35): n stands for inverted deoxyabasic derivative

SEQ ID NO: 6310 - RNA, 35 nt, Artificial Sequence; identical to SEQ ID NO: 6214
  Description of Artificial Sequence:  Enzymatic Nucleic Acid
  misc_feature (1)..(4): Phosphorothioate 3'-Internucleotide Linkage
  misc_feature (1)..(7): 2'-O-Methyl
  misc_feature (13)..(25): 2'-O-Methyl
  misc_feature (27)..(28): 2'-O-Methyl
  misc_feature (30)..(34): 2'-O-Methyl
  misc_feature (8)..(8): 2'-deoxy-2'-amino
  misc_feature (11)..(11): 2'-deoxy-2'-amino
  misc_feature (29)..(29): n stands for inosine
  misc_feature (35)..(35): n stands for inverted deoxyabasic derivative

SEQ ID NO: 6311 - RNA, 35 nt, Artificial Sequence; identical to SEQ ID NO: 6215
  Description of Artificial Sequence:  Enzymatic Nucleic Acid
  misc_feature (1)..(4): Phosphorothioate 3'-Internucleotide Linkage
  misc_feature (1)..(7): 2'-O-Methyl
  misc_feature (13)..(25): 2'-O-Methyl
  misc_feature (27)..(28): 2'-O-Methyl
  misc_feature (30)..(34): 2'-O-Methyl
  misc_feature (8)..(8): 2'-deoxy-2'-amino
  misc_feature (11)..(11): 2'-deoxy-2'-amino
  misc_feature (29)..(29): n stands for inosine
  misc_feature (35)..(35): n stands for inverted deoxyabasic derivative

SEQ ID NO: 6312 - RNA, 35 nt, Artificial Sequence; identical to SEQ ID NO: 6216
  Description of Artificial Sequence:  Enzymatic Nucleic Acid
  misc_feature (1)..(4): Phosphorothioate 3'-Internucleotide Linkage
  misc_feature (1)..(7): 2'-O-Methyl
  misc_feature (13)..(25): 2'-O-Methyl
  misc_feature (27)..(28): 2'-O-Methyl
  misc_feature (30)..(34): 2'-O-Methyl
  misc_feature (8)..(8): 2'-deoxy-2'-amino
  misc_feature (11)..(11): 2'-deoxy-2'-amino
  misc_feature (29)..(29): n stands for inosine
  misc_feature (35)..(35): n stands for inverted deoxyabasic derivative

SEQ ID NO: 6313 - RNA, 35 nt, Artificial Sequence; identical to SEQ ID NO: 6217
  Description of Artificial Sequence:  Enzymatic Nucleic Acid
  misc_feature (1)..(4): Phosphorothioate 3'-Internucleotide Linkage
  misc_feature (1)..(7): 2'-O-Methyl
  misc_feature (13)..(25): 2'-O-Methyl
  misc_feature (27)..(28): 2'-O-Methyl
  misc_feature (30)..(34): 2'-O-Methyl
  misc_feature (8)..(8): 2'-deoxy-2'-amino
  misc_feature (11)..(11): 2'-deoxy-2'-amino
  misc_feature (29)..(29): n stands for inosine
  misc_feature (35)..(35): n stands for inverted deoxyabasic derivative

SEQ ID NO: 6314 - RNA, 35 nt, Artificial Sequence; identical to SEQ ID NO: 6218
  Description of Artificial Sequence:  Enzymatic Nucleic Acid
  misc_feature (1)..(4): Phosphorothioate 3'-Internucleotide Linkage
  misc_feature (1)..(7): 2'-O-Methyl
  misc_feature (13)..(25): 2'-O-Methyl
  misc_feature (27)..(28): 2'-O-Methyl
  misc_feature (30)..(34): 2'-O-Methyl
  misc_feature (8)..(8): 2'-deoxy-2'-amino
  misc_feature (11)..(11): 2'-deoxy-2'-amino
  misc_feature (29)..(29): n stands for inosine
  misc_feature (35)..(35): n stands for inverted deoxyabasic derivative

SEQ ID NO: 6315 - RNA, 35 nt, Artificial Sequence; identical to SEQ ID NO: 6219
  Description of Artificial Sequence:  Enzymatic Nucleic Acid
  misc_feature (1)..(4): Phosphorothioate 3'-Internucleotide Linkage
  misc_feature (1)..(7): 2'-O-Methyl
  misc_feature (13)..(25): 2'-O-Methyl
  misc_feature (27)..(28): 2'-O-Methyl
  misc_feature (30)..(34): 2'-O-Methyl
  misc_feature (8)..(8): 2'-deoxy-2'-amino
  misc_feature (11)..(11): 2'-deoxy-2'-amino
  misc_feature (29)..(29): n stands for inosine
  misc_feature (35)..(35): n stands for inverted deoxyabasic derivative

SEQ ID NO: 6316 - RNA, 35 nt, Artificial Sequence; identical to SEQ ID NO: 6220
  Description of Artificial Sequence:  Enzymatic Nucleic Acid
  misc_feature (1)..(4): Phosphorothioate 3'-Internucleotide Linkage
  misc_feature (1)..(7): 2'-O-Methyl
  misc_feature (13)..(25): 2'-O-Methyl
  misc_feature (27)..(28): 2'-O-Methyl
  misc_feature (30)..(34): 2'-O-Methyl
  misc_feature (8)..(8): 2'-deoxy-2'-amino
  misc_feature (11)..(11): 2'-deoxy-2'-amino
  misc_feature (29)..(29): n stands for inosine
  misc_feature (35)..(35): n stands for inverted deoxyabasic derivative

SEQ ID NO: 6317 - RNA, 35 nt, Artificial Sequence; identical to SEQ ID NO: 6221
  Description of Artificial Sequence:  Enzymatic Nucleic Acid
  misc_feature (1)..(4): Phosphorothioate 3'-Internucleotide Linkage
  misc_feature (1)..(7): 2'-O-Methyl
  misc_feature (13)..(25): 2'-O-Methyl
  misc_feature (27)..(28): 2'-O-Methyl
  misc_feature (30)..(34): 2'-O-Methyl
  misc_feature (8)..(8): 2'-deoxy-2'-amino
  misc_feature (11)..(11): 2'-deoxy-2'-amino
  misc_feature (29)..(29): n stands for inosine
  misc_feature (35)..(35): n stands for inverted deoxyabasic derivative

SEQ ID NO: 6318 - RNA, 35 nt, Artificial Sequence; identical to SEQ ID NO: 6222
  Description of Artificial Sequence:  Enzymatic Nucleic Acid
  misc_feature (1)..(4): Phosphorothioate 3'-Internucleotide Linkage
  misc_feature (1)..(7): 2'-O-Methyl
  misc_feature (13)..(25): 2'-O-Methyl
  misc_feature (27)..(28): 2'-O-Methyl
  misc_feature (30)..(34): 2'-O-Methyl
  misc_feature (8)..(8): 2'-deoxy-2'-amino
  misc_feature (11)..(11): 2'-deoxy-2'-amino
  misc_feature (29)..(29): n stands for inosine
  misc_feature (35)..(35): n stands for inverted deoxyabasic derivative

SEQ ID NO: 6319 - RNA, 37 nt, Artificial Sequence; identical to SEQ ID NO: 6223
  Description of Artificial Sequence:  Enzymatic Nucleic Acid
  misc_feature (1)..(4): Phosphorothioate 3'-Internucleotide Linkage
  misc_feature (1)..(8): 2'-O-Methyl
  misc_feature (14)..(26): 2'-O-Methyl
  misc_feature (28)..(29): 2'-O-Methyl
  misc_feature (31)..(36): 2'-O-Methyl
  misc_feature (9)..(9): 2'-deoxy-2'-amino
  misc_feature (12)..(12): 2'-deoxy-2'-amino
  misc_feature (37)..(37): n stands for inverted deoxyabasic derivative

SEQ ID NO: 6320 - RNA, 37 nt, Artificial Sequence; identical to SEQ ID NO: 6224
  Description of Artificial Sequence:  Enzymatic Nucleic Acid
  misc_feature (1)..(4): Phosphorothioate 3'-Internucleotide Linkage
  misc_feature (1)..(8): 2'-O-Methyl
  misc_feature (14)..(26): 2'-O-Methyl
  misc_feature (28)..(29): 2'-O-Methyl
  misc_feature (31)..(36): 2'-O-Methyl
  misc_feature (9)..(9): 2'-deoxy-2'-amino
  misc_feature (12)..(12): 2'-deoxy-2'-amino
  misc_feature (37)..(37): n stands for inverted deoxyabasic derivative

SEQ ID NO: 6321 - RNA, 37 nt, Artificial Sequence; identical to SEQ ID NO: 6225
  Description of Artificial Sequence:  Enzymatic Nucleic Acid
  misc_feature (1)..(4): Phosphorothioate 3'-Internucleotide Linkage
  misc_feature (1)..(8): 2'-O-Methyl
  misc_feature (14)..(26): 2'-O-Methyl
  misc_feature (28)..(29): 2'-O-Methyl
  misc_feature (31)..(36): 2'-O-Methyl
  misc_feature (9)..(9): 2'-deoxy-2'-amino
  misc_feature (12)..(12): 2'-deoxy-2'-amino
  misc_feature (37)..(37): n stands for inverted deoxyabasic derivative

SEQ ID NO: 6322 - RNA, 37 nt, Artificial Sequence; identical to SEQ ID NO: 6226
  Description of Artificial Sequence:  Enzymatic Nucleic Acid
  misc_feature (1)..(4): Phosphorothioate 3'-Internucleotide Linkage
  misc_feature (1)..(8): 2'-O-Methyl
  misc_feature (14)..(26): 2'-O-Methyl
  misc_feature (28)..(29): 2'-O-Methyl
  misc_feature (31)..(36): 2'-O-Methyl
  misc_feature (9)..(9): 2'-deoxy-2'-amino
  misc_feature (12)..(12): 2'-deoxy-2'-amino
  misc_feature (37)..(37): n stands for inverted deoxyabasic derivative

SEQ ID NO: 6323 - RNA, 37 nt, Artificial Sequence; identical to SEQ ID NO: 6227
  Description of Artificial Sequence:  Enzymatic Nucleic Acid
  misc_feature (1)..(4): Phosphorothioate 3'-Internucleotide Linkage
  misc_feature (1)..(8): 2'-O-Methyl
  misc_feature (14)..(26): 2'-O-Methyl
  misc_feature (28)..(29): 2'-O-Methyl
  misc_feature (31)..(36): 2'-O-Methyl
  misc_feature (9)..(9): 2'-deoxy-2'-amino
  misc_feature (12)..(12): 2'-deoxy-2'-amino
  misc_feature (37)..(37): n stands for inverted deoxyabasic derivative

SEQ ID NO: 6324 - RNA, 37 nt, Artificial Sequence; identical to SEQ ID NO: 6228
  Description of Artificial Sequence:  Enzymatic Nucleic Acid
  misc_feature (1)..(4): Phosphorothioate 3'-Internucleotide Linkage
  misc_feature (1)..(8): 2'-O-Methyl
  misc_feature (14)..(26): 2'-O-Methyl
  misc_feature (28)..(29): 2'-O-Methyl
  misc_feature (31)..(36): 2'-O-Methyl
  misc_feature (9)..(9): 2'-deoxy-2'-amino
  misc_feature (12)..(12): 2'-deoxy-2'-amino
  misc_feature (37)..(37): n stands for inverted deoxyabasic derivative

SEQ ID NO: 6325 - RNA, 37 nt, Artificial Sequence; identical to SEQ ID NO: 6229
  Description of Artificial Sequence:  Enzymatic Nucleic Acid
  misc_feature (1)..(4): Phosphorothioate 3'-Internucleotide Linkage
  misc_feature (1)..(8): 2'-O-Methyl
  misc_feature (14)..(26): 2'-O-Methyl
  misc_feature (28)..(29): 2'-O-Methyl
  misc_feature (31)..(36): 2'-O-Methyl
  misc_feature (9)..(9): 2'-deoxy-2'-amino
  misc_feature (12)..(12): 2'-deoxy-2'-amino
  misc_feature (37)..(37): n stands for inverted deoxyabasic derivative

SEQ ID NO: 6326 - RNA, 37 nt, Artificial Sequence; identical to SEQ ID NO: 6230
  Description of Artificial Sequence:  Enzymatic Nucleic Acid
  misc_feature (1)..(4): Phosphorothioate 3'-Internucleotide Linkage
  misc_feature (1)..(8): 2'-O-Methyl
  misc_feature (14)..(26): 2'-O-Methyl
  misc_feature (28)..(29): 2'-O-Methyl
  misc_feature (31)..(36): 2'-O-Methyl
  misc_feature (9)..(9): 2'-deoxy-2'-amino
  misc_feature (12)..(12): 2'-deoxy-2'-amino
  misc_feature (37)..(37): n stands for inverted deoxyabasic derivative

SEQ ID NO: 6327 - RNA, 37 nt, Artificial Sequence; identical to SEQ ID NO: 6231
  Description of Artificial Sequence:  Enzymatic Nucleic Acid
  misc_feature (1)..(4): Phosphorothioate 3'-Internucleotide Linkage
  misc_feature (1)..(8): 2'-O-Methyl
  misc_feature (14)..(26): 2'-O-Methyl
  misc_feature (28)..(29): 2'-O-Methyl
  misc_feature (31)..(36): 2'-O-Methyl
  misc_feature (9)..(9): 2'-deoxy-2'-amino
  misc_feature (12)..(12): 2'-deoxy-2'-amino
  misc_feature (37)..(37): n stands for inverted deoxyabasic derivative

SEQ ID NO: 6328 - RNA, 37 nt, Artificial Sequence; identical to SEQ ID NO: 6232
  Description of Artificial Sequence:  Enzymatic Nucleic Acid
  misc_feature (1)..(4): Phosphorothioate 3'-Internucleotide Linkage
  misc_feature (1)..(8): 2'-O-Methyl
  misc_feature (14)..(26): 2'-O-Methyl
  misc_feature (28)..(29): 2'-O-Methyl
  misc_feature (31)..(36): 2'-O-Methyl
  misc_feature (9)..(9): 2'-deoxy-2'-amino
  misc_feature (12)..(12): 2'-deoxy-2'-amino
  misc_feature (37)..(37): n stands for inverted deoxyabasic derivative

SEQ ID NO: 6329 - RNA, 37 nt, Artificial Sequence; identical to SEQ ID NO: 6233
  Description of Artificial Sequence:  Enzymatic Nucleic Acid
  misc_feature (1)..(4): Phosphorothioate 3'-Internucleotide Linkage
  misc_feature (1)..(8): 2'-O-Methyl
  misc_feature (14)..(26): 2'-O-Methyl
  misc_feature (28)..(29): 2'-O-Methyl
  misc_feature (31)..(36): 2'-O-Methyl
  misc_feature (9)..(9): 2'-deoxy-2'-amino
  misc_feature (12)..(12): 2'-deoxy-2'-amino
  misc_feature (37)..(37): n stands for inverted deoxyabasic derivative

SEQ ID NO: 6330 - RNA, 37 nt, Artificial Sequence; identical to SEQ ID NO: 6234
  Description of Artificial Sequence:  Enzymatic Nucleic Acid
  misc_feature (1)..(4): Phosphorothioate 3'-Internucleotide Linkage
  misc_feature (1)..(8): 2'-O-Methyl
  misc_feature (14)..(26): 2'-O-Methyl
  misc_feature (28)..(29): 2'-O-Methyl
  misc_feature (31)..(36): 2'-O-Methyl
  misc_feature (9)..(9): 2'-deoxy-2'-amino
  misc_feature (12)..(12): 2'-deoxy-2'-amino
  misc_feature (37)..(37): n stands for inverted deoxyabasic derivative

SEQ ID NO: 6331 - RNA, 37 nt, Artificial Sequence; identical to SEQ ID NO: 6235
  Description of Artificial Sequence:  Enzymatic Nucleic Acid
  misc_feature (1)..(4): Phosphorothioate 3'-Internucleotide Linkage
  misc_feature (1)..(8): 2'-O-Methyl
  misc_feature (14)..(26): 2'-O-Methyl
  misc_feature (28)..(29): 2'-O-Methyl
  misc_feature (31)..(36): 2'-O-Methyl
  misc_feature (9)..(9): 2'-deoxy-2'-amino
  misc_feature (12)..(12): 2'-deoxy-2'-amino
  misc_feature (37)..(37): n stands for inverted deoxyabasic derivative

SEQ ID NO: 6332 - RNA, 37 nt, Artificial Sequence; identical to SEQ ID NO: 6236
  Description of Artificial Sequence:  Enzymatic Nucleic Acid
  misc_feature (1)..(4): Phosphorothioate 3'-Internucleotide Linkage
  misc_feature (1)..(8): 2'-O-Methyl
  misc_feature (14)..(26): 2'-O-Methyl
  misc_feature (28)..(29): 2'-O-Methyl
  misc_feature (31)..(36): 2'-O-Methyl
  misc_feature (9)..(9): 2'-deoxy-2'-amino
  misc_feature (12)..(12): 2'-deoxy-2'-amino
  misc_feature (37)..(37): n stands for inverted deoxyabasic derivative

SEQ ID NO: 6333 - RNA, 37 nt, Artificial Sequence; identical to SEQ ID NO: 6237
  Description of Artificial Sequence:  Enzymatic Nucleic Acid
  misc_feature (1)..(4): Phosphorothioate 3'-Internucleotide Linkage
  misc_feature (1)..(8): 2'-O-Methyl
  misc_feature (14)..(26): 2'-O-Methyl
  misc_feature (28)..(29): 2'-O-Methyl
  misc_feature (31)..(36): 2'-O-Methyl
  misc_feature (9)..(9): 2'-deoxy-2'-amino
  misc_feature (12)..(12): 2'-deoxy-2'-amino
  misc_feature (37)..(37): n stands for inverted deoxyabasic derivative

SEQ ID NO: 6334 - RNA, 37 nt, Artificial Sequence; identical to SEQ ID NO: 6238
  Description of Artificial Sequence:  Enzymatic Nucleic Acid
  misc_feature (1)..(4): Phosphorothioate 3'-Internucleotide Linkage
  misc_feature (1)..(8): 2'-O-Methyl
  misc_feature (14)..(26): 2'-O-Methyl
  misc_feature (28)..(29): 2'-O-Methyl
  misc_feature (31)..(36): 2'-O-Methyl
  misc_feature (9)..(9): 2'-deoxy-2'-amino
  misc_feature (12)..(12): 2'-deoxy-2'-amino
  misc_feature (37)..(37): n stands for inverted deoxyabasic derivative

SEQ ID NO: 6335 - RNA, 37 nt, Artificial Sequence; identical to SEQ ID NO: 6239
  Description of Artificial Sequence:  Enzymatic Nucleic Acid
  misc_feature (1)..(4): Phosphorothioate 3'-Internucleotide Linkage
  misc_feature (1)..(8): 2'-O-Methyl
  misc_feature (14)..(26): 2'-O-Methyl
  misc_feature (28)..(29): 2'-O-Methyl
  misc_feature (31)..(36): 2'-O-Methyl
  misc_feature (9)..(9): 2'-deoxy-2'-amino
  misc_feature (12)..(12): 2'-deoxy-2'-amino
  misc_feature (37)..(37): n stands for inverted deoxyabasic derivative

SEQ ID NO: 6336 - RNA, 37 nt, Artificial Sequence; identical to SEQ ID NO: 6240
  Description of Artificial Sequence:  Enzymatic Nucleic Acid
  misc_feature (1)..(4): Phosphorothioate 3'-Internucleotide Linkage
  misc_feature (1)..(8): 2'-O-Methyl
  misc_feature (14)..(26): 2'-O-Methyl
  misc_feature (28)..(29): 2'-O-Methyl
  misc_feature (31)..(36): 2'-O-Methyl
  misc_feature (9)..(9): 2'-deoxy-2'-amino
  misc_feature (12)..(12): 2'-deoxy-2'-amino
  misc_feature (37)..(37): n stands for inverted deoxyabasic derivative

SEQ ID NO: 6337 - RNA, 37 nt, Artificial Sequence; identical to SEQ ID NO: 6241
  Description of Artificial Sequence:  Enzymatic Nucleic Acid
  misc_feature (1)..(4): Phosphorothioate 3'-Internucleotide Linkage
  misc_feature (1)..(8): 2'-O-Methyl
  misc_feature (14)..(26): 2'-O-Methyl
  misc_feature (28)..(29): 2'-O-Methyl
  misc_feature (31)..(36): 2'-O-Methyl
  misc_feature (9)..(9): 2'-deoxy-2'-amino
  misc_feature (12)..(12): 2'-deoxy-2'-amino
  misc_feature (37)..(37): n stands for inverted deoxyabasic derivative

SEQ ID NO: 6338 - RNA, 37 nt, Artificial Sequence; identical to SEQ ID NO: 6242
  Description of Artificial Sequence:  Enzymatic Nucleic Acid
  misc_feature (1)..(4): Phosphorothioate 3'-Internucleotide Linkage
  misc_feature (1)..(8): 2'-O-Methyl
  misc_feature (14)..(26): 2'-O-Methyl
  misc_feature (28)..(29): 2'-O-Methyl
  misc_feature (31)..(36): 2'-O-Methyl
  misc_feature (9)..(9): 2'-deoxy-2'-amino
  misc_feature (12)..(12): 2'-deoxy-2'-amino
  misc_feature (37)..(37): n stands for inverted deoxyabasic derivative

SEQ ID NO: 6339 - RNA, 37 nt, Artificial Sequence; identical to SEQ ID NO: 6243
  Description of Artificial Sequence:  Enzymatic Nucleic Acid
  misc_feature (1)..(4): Phosphorothioate 3'-Internucleotide Linkage
  misc_feature (1)..(8): 2'-O-Methyl
  misc_feature (14)..(26): 2'-O-Methyl
  misc_feature (28)..(29): 2'-O-Methyl
  misc_feature (31)..(36): 2'-O-Methyl
  misc_feature (9)..(9): 2'-deoxy-2'-amino
  misc_feature (12)..(12): 2'-deoxy-2'-amino
  misc_feature (37)..(37): n stands for inverted deoxyabasic derivative

SEQ ID NO: 6340 - RNA, 37 nt, Artificial Sequence; identical to SEQ ID NO: 6244
  Description of Artificial Sequence:  Enzymatic Nucleic Acid
  misc_feature (1)..(4): Phosphorothioate 3'-Internucleotide Linkage
  misc_feature (1)..(8): 2'-O-Methyl
  misc_feature (14)..(26): 2'-O-Methyl
  misc_feature (28)..(29): 2'-O-Methyl
  misc_feature (31)..(36): 2'-O-Methyl
  misc_feature (9)..(9): 2'-deoxy-2'-amino
  misc_feature (12)..(12): 2'-deoxy-2'-amino
  misc_feature (37)..(37): n stands for inverted deoxyabasic derivative

SEQ ID NO: 6341 - RNA, 37 nt, Artificial Sequence; identical to SEQ ID NO: 6245
  Description of Artificial Sequence:  Enzymatic Nucleic Acid
  misc_feature (1)..(4): Phosphorothioate 3'-Internucleotide Linkage
  misc_feature (1)..(8): 2'-O-Methyl
  misc_feature (14)..(26): 2'-O-Methyl
  misc_feature (28)..(29): 2'-O-Methyl
  misc_feature (31)..(36): 2'-O-Methyl
  misc_feature (9)..(9): 2'-deoxy-2'-amino
  misc_feature (12)..(12): 2'-deoxy-2'-amino
  misc_feature (37)..(37): n stands for inverted deoxyabasic derivative

SEQ ID NO: 6342 - RNA, 37 nt, Artificial Sequence; identical to SEQ ID NO: 6181
  Description of Artificial Sequence:  Enzymatic Nucleic Acid
  misc_feature (1)..(4): Phosphorothioate 3'-Internucleotide Linkage
  misc_feature (1)..(8): 2'-O-Methyl
  misc_feature (14)..(26): 2'-O-Methyl
  misc_feature (28)..(29): 2'-O-Methyl
  misc_feature (31)..(36): 2'-O-Methyl
  misc_feature (9)..(9): 2'-deoxy-2'-amino
  misc_feature (12)..(12): 2'-deoxy-2'-amino
  misc_feature (37)..(37): n stands for inverted deoxyabasic derivative

SEQ ID NO: 6343 - RNA, 37 nt, Artificial Sequence; identical to SEQ ID NO: 6247
  Description of Artificial Sequence:  Enzymatic Nucleic Acid
  misc_feature (1)..(4): Phosphorothioate 3'-Internucleotide Linkage
  misc_feature (1)..(8): 2'-O-Methyl
  misc_feature (14)..(26): 2'-O-Methyl
  misc_feature (28)..(29): 2'-O-Methyl
  misc_feature (31)..(36): 2'-O-Methyl
  misc_feature (9)..(9): 2'-deoxy-2'-amino
  misc_feature (12)..(12): 2'-deoxy-2'-amino
  misc_feature (37)..(37): n stands for inverted deoxyabasic derivative

SEQ ID NO: 6344 - RNA, 37 nt, Artificial Sequence; identical to SEQ ID NO: 6248
  Description of Artificial Sequence:  Enzymatic Nucleic Acid
  misc_feature (1)..(4): Phosphorothioate 3'-Internucleotide Linkage
  misc_feature (1)..(8): 2'-O-Methyl
  misc_feature (14)..(26): 2'-O-Methyl
  misc_feature (28)..(29): 2'-O-Methyl
  misc_feature (31)..(36): 2'-O-Methyl
  misc_feature (9)..(9): 2'-deoxy-2'-amino
  misc_feature (12)..(12): 2'-deoxy-2'-amino
  misc_feature (37)..(37): n stands for inverted deoxyabasic derivative

SEQ ID NO: 6345 - RNA, 37 nt, Artificial Sequence; identical to SEQ ID NO: 6249
  Description of Artificial Sequence:  Enzymatic Nucleic Acid
  misc_feature (1)..(4): Phosphorothioate 3'-Internucleotide Linkage
  misc_feature (1)..(8): 2'-O-Methyl
  misc_feature (14)..(26): 2'-O-Methyl
  misc_feature (28)..(29): 2'-O-Methyl
  misc_feature (31)..(36): 2'-O-Methyl
  misc_feature (9)..(9): 2'-deoxy-2'-amino
  misc_feature (12)..(12): 2'-deoxy-2'-amino
  misc_feature (37)..(37): n stands for inverted deoxyabasic derivative

SEQ ID NO: 6346 - RNA, 37 nt, Artificial Sequence; identical to SEQ ID NO: 6250
  Description of Artificial Sequence:  Enzymatic Nucleic Acid
  misc_feature (1)..(4): Phosphorothioate 3'-Internucleotide Linkage
  misc_feature (1)..(8): 2'-O-Methyl
  misc_feature (14)..(26): 2'-O-Methyl
  misc_feature (28)..(29): 2'-O-Methyl
  misc_feature (31)..(36): 2'-O-Methyl
  misc_feature (9)..(9): 2'-deoxy-2'-amino
  misc_feature (12)..(12): 2'-deoxy-2'-amino
  misc_feature (37)..(37): n stands for inverted deoxyabasic derivative

SEQ ID NO: 6347 - RNA, 37 nt, Artificial Sequence; identical to SEQ ID NO: 6251
  Description of Artificial Sequence:  Enzymatic Nucleic Acid
  misc_feature (1)..(4): Phosphorothioate 3'-Internucleotide Linkage
  misc_feature (1)..(8): 2'-O-Methyl
  misc_feature (14)..(26): 2'-O-Methyl
  misc_feature (28)..(29): 2'-O-Methyl
  misc_feature (31)..(36): 2'-O-Methyl
  misc_feature (9)..(9): 2'-deoxy-2'-amino
  misc_feature (12)..(12): 2'-deoxy-2'-amino
  misc_feature (37)..(37): n stands for inverted deoxyabasic derivative

SEQ ID NO: 6348 - RNA, 37 nt, Artificial Sequence; identical to SEQ ID NO: 6252
  Description of Artificial Sequence:  Enzymatic Nucleic Acid
  misc_feature (1)..(4): Phosphorothioate 3'-Internucleotide Linkage
  misc_feature (1)..(8): 2'-O-Methyl
  misc_feature (14)..(26): 2'-O-Methyl
  misc_feature (28)..(29): 2'-O-Methyl
  misc_feature (31)..(36): 2'-O-Methyl
  misc_feature (9)..(9): 2'-deoxy-2'-amino
  misc_feature (12)..(12): 2'-deoxy-2'-amino
  misc_feature (37)..(37): n stands for inverted deoxyabasic derivative

SEQ ID NO: 6349 - RNA, 37 nt, Artificial Sequence; identical to SEQ ID NO: 6253
  Description of Artificial Sequence:  Enzymatic Nucleic Acid
  misc_feature (1)..(4): Phosphorothioate 3'-Internucleotide Linkage
  misc_feature (1)..(8): 2'-O-Methyl
  misc_feature (14)..(26): 2'-O-Methyl
  misc_feature (28)..(29): 2'-O-Methyl
  misc_feature (31)..(36): 2'-O-Methyl
  misc_feature (9)..(9): 2'-deoxy-2'-amino
  misc_feature (12)..(12): 2'-deoxy-2'-amino
  misc_feature (37)..(37): n stands for inverted deoxyabasic derivative

SEQ ID NO: 6350 - RNA, 37 nt, Artificial Sequence; identical to SEQ ID NO: 6254
  Description of Artificial Sequence:  Enzymatic Nucleic Acid
  misc_feature (1)..(4): Phosphorothioate 3'-Internucleotide Linkage
  misc_feature (1)..(8): 2'-O-Methyl
  misc_feature (14)..(26): 2'-O-Methyl
  misc_feature (28)..(29): 2'-O-Methyl
  misc_feature (31)..(36): 2'-O-Methyl
  misc_feature (9)..(9): 2'-deoxy-2'-amino
  misc_feature (12)..(12): 2'-deoxy-2'-amino
  misc_feature (37)..(37): n stands for inverted deoxyabasic derivative

SEQ ID NO: 6351 - RNA, 37 nt, Artificial Sequence; identical to SEQ ID NO: 6255
  Description of Artificial Sequence:  Enzymatic Nucleic Acid
  misc_feature (1)..(4): Phosphorothioate 3'-Internucleotide Linkage
  misc_feature (1)..(8): 2'-O-Methyl
  misc_feature (14)..(26): 2'-O-Methyl
  misc_feature (28)..(29): 2'-O-Methyl
  misc_feature (31)..(36): 2'-O-Methyl
  misc_feature (9)..(9): 2'-deoxy-2'-amino
  misc_feature (12)..(12): 2'-deoxy-2'-amino
  misc_feature (30)..(30): n stands for inosine
  misc_feature (37)..(37): n stands for inverted deoxyabasic derivative

SEQ ID NO: 6352 - RNA, 37 nt, Artificial Sequence; identical to SEQ ID NO: 6256
  Description of Artificial Sequence:  Enzymatic Nucleic Acid
  misc_feature (1)..(4): Phosphorothioate 3'-Internucleotide Linkage
  misc_feature (1)..(8): 2'-O-Methyl
  misc_feature (14)..(26): 2'-O-Methyl
  misc_feature (28)..(29): 2'-O-Methyl
  misc_feature (31)..(36): 2'-O-Methyl
  misc_feature (9)..(9): 2'-deoxy-2'-amino
  misc_feature (12)..(12): 2'-deoxy-2'-amino
  misc_feature (30)..(30): n stands for inosine
  misc_feature (37)..(37): n stands for inverted deoxyabasic derivative

SEQ ID NO: 6353 - RNA, 37 nt, Artificial Sequence; identical to SEQ ID NO: 6257
  Description of Artificial Sequence:  Enzymatic Nucleic Acid
  misc_feature (1)..(4): Phosphorothioate 3'-Internucleotide Linkage
  misc_feature (1)..(8): 2'-O-Methyl
  misc_feature (14)..(26): 2'-O-Methyl
  misc_feature (28)..(29): 2'-O-Methyl
  misc_feature (31)..(36): 2'-O-Methyl
  misc_feature (9)..(9): 2'-deoxy-2'-amino
  misc_feature (12)..(12): 2'-deoxy-2'-amino
  misc_feature (30)..(30): n stands for inosine
  misc_feature (37)..(37): n stands for inverted deoxyabasic derivative

SEQ ID NO: 6354 - RNA, 37 nt, Artificial Sequence; identical to SEQ ID NO: 6258
  Description of Artificial Sequence:  Enzymatic Nucleic Acid
  misc_feature (1)..(4): Phosphorothioate 3'-Internucleotide Linkage
  misc_feature (1)..(8): 2'-O-Methyl
  misc_feature (14)..(26): 2'-O-Methyl
  misc_feature (28)..(29): 2'-O-Methyl
  misc_feature (31)..(36): 2'-O-Methyl
  misc_feature (9)..(9): 2'-deoxy-2'-amino
  misc_feature (12)..(12): 2'-deoxy-2'-amino
  misc_feature (30)..(30): n stands for inosine
  misc_feature (37)..(37): n stands for inverted deoxyabasic derivative

SEQ ID NO: 6355 - RNA, 37 nt, Artificial Sequence; identical to SEQ ID NO: 6259
  Description of Artificial Sequence:  Enzymatic Nucleic Acid
  misc_feature (1)..(4): Phosphorothioate 3'-Internucleotide Linkage
  misc_feature (1)..(8): 2'-O-Methyl
  misc_feature (14)..(26): 2'-O-Methyl
  misc_feature (28)..(29): 2'-O-Methyl
  misc_feature (31)..(36): 2'-O-Methyl
  misc_feature (9)..(9): 2'-deoxy-2'-amino
  misc_feature (12)..(12): 2'-deoxy-2'-amino
  misc_feature (30)..(30): n stands for inosine
  misc_feature (37)..(37): n stands for inverted deoxyabasic derivative

SEQ ID NO: 6356 - RNA, 37 nt, Artificial Sequence; identical to SEQ ID NO: 6260
  Description of Artificial Sequence:  Enzymatic Nucleic Acid
  misc_feature (1)..(4): Phosphorothioate 3'-Internucleotide Linkage
  misc_feature (1)..(8): 2'-O-Methyl
  misc_feature (14)..(26): 2'-O-Methyl
  misc_feature (28)..(29): 2'-O-Methyl
  misc_feature (31)..(36): 2'-O-Methyl
  misc_feature (9)..(9): 2'-deoxy-2'-amino
  misc_feature (12)..(12): 2'-deoxy-2'-amino
  misc_feature (30)..(30): n stands for inosine
  misc_feature (37)..(37): n stands for inverted deoxyabasic derivative

SEQ ID NO: 6357 - RNA, 37 nt, Artificial Sequence; identical to SEQ ID NO: 6261
  Description of Artificial Sequence:  Enzymatic Nucleic Acid
  misc_feature (1)..(4): Phosphorothioate 3'-Internucleotide Linkage
  misc_feature (1)..(8): 2'-O-Methyl
  misc_feature (14)..(26): 2'-O-Methyl
  misc_feature (28)..(29): 2'-O-Methyl
  misc_feature (31)..(36): 2'-O-Methyl
  misc_feature (9)..(9): 2'-deoxy-2'-amino
  misc_feature (12)..(12): 2'-deoxy-2'-amino
  misc_feature (30)..(30): n stands for inosine
  misc_feature (37)..(37): n stands for inverted deoxyabasic derivative

SEQ ID NO: 6358 - RNA, 37 nt, Artificial Sequence; identical to SEQ ID NO: 6262
  Description of Artificial Sequence:  Enzymatic Nucleic Acid
  misc_feature (1)..(4): Phosphorothioate 3'-Internucleotide Linkage
  misc_feature (1)..(8): 2'-O-Methyl
  misc_feature (14)..(26): 2'-O-Methyl
  misc_feature (28)..(29): 2'-O-Methyl
  misc_feature (31)..(36): 2'-O-Methyl
  misc_feature (9)..(9): 2'-deoxy-2'-amino
  misc_feature (12)..(12): 2'-deoxy-2'-amino
  misc_feature (30)..(30): n stands for inosine
  misc_feature (37)..(37): n stands for inverted deoxyabasic derivative

SEQ ID NO: 6359 - RNA, 37 nt, Artificial Sequence; identical to SEQ ID NO: 6263
  Description of Artificial Sequence:  Enzymatic Nucleic Acid
  misc_feature (1)..(4): Phosphorothioate 3'-Internucleotide Linkage
  misc_feature (1)..(8): 2'-O-Methyl
  misc_feature (14)..(26): 2'-O-Methyl
  misc_feature (28)..(29): 2'-O-Methyl
  misc_feature (31)..(36): 2'-O-Methyl
  misc_feature (9)..(9): 2'-deoxy-2'-amino
  misc_feature (12)..(12): 2'-deoxy-2'-amino
  misc_feature (30)..(30): n stands for inosine
  misc_feature (37)..(37): n stands for inverted deoxyabasic derivative

SEQ ID NO: 6360 - RNA, 37 nt, Artificial Sequence; identical to SEQ ID NO: 6264
  Description of Artificial Sequence:  Enzymatic Nucleic Acid
  misc_feature (1)..(4): Phosphorothioate 3'-Internucleotide Linkage
  misc_feature (1)..(8): 2'-O-Methyl
  misc_feature (14)..(26): 2'-O-Methyl
  misc_feature (28)..(29): 2'-O-Methyl
  misc_feature (31)..(36): 2'-O-Methyl
  misc_feature (9)..(9): 2'-deoxy-2'-amino
  misc_feature (12)..(12): 2'-deoxy-2'-amino
  misc_feature (30)..(30): n stands for inosine
  misc_feature (37)..(37): n stands for inverted deoxyabasic derivative

SEQ ID NO: 6361 - RNA, 37 nt, Artificial Sequence; identical to SEQ ID NO: 6265
  Description of Artificial Sequence:  Enzymatic Nucleic Acid
  misc_feature (1)..(4): Phosphorothioate 3'-Internucleotide Linkage
  misc_feature (1)..(8): 2'-O-Methyl
  misc_feature (14)..(26): 2'-O-Methyl
  misc_feature (28)..(29): 2'-O-Methyl
  misc_feature (31)..(36): 2'-O-Methyl
  misc_feature (9)..(9): 2'-deoxy-2'-amino
  misc_feature (12)..(12): 2'-deoxy-2'-amino
  misc_feature (30)..(30): n stands for inosine
  misc_feature (37)..(37): n stands for inverted deoxyabasic derivative

SEQ ID NO: 6362 - RNA, 37 nt, Artificial Sequence; identical to SEQ ID NO: 6266
  Description of Artificial Sequence:  Enzymatic Nucleic Acid
  misc_feature (1)..(4): Phosphorothioate 3'-Internucleotide Linkage
  misc_feature (1)..(8): 2'-O-Methyl
  misc_feature (14)..(26): 2'-O-Methyl
  misc_feature (28)..(29): 2'-O-Methyl
  misc_feature (31)..(36): 2'-O-Methyl
  misc_feature (9)..(9): 2'-deoxy-2'-amino
  misc_feature (12)..(12): 2'-deoxy-2'-amino
  misc_feature (30)..(30): n stands for inosine
  misc_feature (37)..(37): n stands for inverted deoxyabasic derivative

SEQ ID NO: 6363 - RNA, 37 nt, Artificial Sequence; identical to SEQ ID NO: 6267
  Description of Artificial Sequence:  Enzymatic Nucleic Acid
  misc_feature (1)..(4): Phosphorothioate 3'-Internucleotide Linkage
  misc_feature (1)..(8): 2'-O-Methyl
  misc_feature (14)..(26): 2'-O-Methyl
  misc_feature (28)..(29): 2'-O-Methyl
  misc_feature (31)..(36): 2'-O-Methyl
  misc_feature (9)..(9): 2'-deoxy-2'-amino
  misc_feature (12)..(12): 2'-deoxy-2'-amino
  misc_feature (30)..(30): n stands for inosine
  misc_feature (37)..(37): n stands for inverted deoxyabasic derivative

SEQ ID NO: 6364 - RNA, 37 nt, Artificial Sequence; identical to SEQ ID NO: 6268
  Description of Artificial Sequence:  Enzymatic Nucleic Acid
  misc_feature (1)..(4): Phosphorothioate 3'-Internucleotide Linkage
  misc_feature (1)..(8): 2'-O-Methyl
  misc_feature (14)..(26): 2'-O-Methyl
  misc_feature (28)..(29): 2'-O-Methyl
  misc_feature (31)..(36): 2'-O-Methyl
  misc_feature (9)..(9): 2'-deoxy-2'-amino
  misc_feature (12)..(12): 2'-deoxy-2'-amino
  misc_feature (30)..(30): n stands for inosine
  misc_feature (37)..(37): n stands for inverted deoxyabasic derivative

SEQ ID NO: 6365 - RNA, 37 nt, Artificial Sequence; identical to SEQ ID NO: 6269
  Description of Artificial Sequence:  Enzymatic Nucleic Acid
  misc_feature (1)..(4): Phosphorothioate 3'-Internucleotide Linkage
  misc_feature (1)..(8): 2'-O-Methyl
  misc_feature (14)..(26): 2'-O-Methyl
  misc_feature (28)..(29): 2'-O-Methyl
  misc_feature (31)..(36): 2'-O-Methyl
  misc_feature (9)..(9): 2'-deoxy-2'-amino
  misc_feature (12)..(12): 2'-deoxy-2'-amino
  misc_feature (30)..(30): n stands for inosine
  misc_feature (37)..(37): n stands for inverted deoxyabasic derivative

SEQ ID NO: 6366 - RNA, 37 nt, Artificial Sequence; identical to SEQ ID NO: 6270
  Description of Artificial Sequence:  Enzymatic Nucleic Acid
  misc_feature (1)..(4): Phosphorothioate 3'-Internucleotide Linkage
  misc_feature (1)..(8): 2'-O-Methyl
  misc_feature (14)..(26): 2'-O-Methyl
  misc_feature (28)..(29): 2'-O-Methyl
  misc_feature (31)..(36): 2'-O-Methyl
  misc_feature (9)..(9): 2'-deoxy-2'-amino
  misc_feature (12)..(12): 2'-deoxy-2'-amino
  misc_feature (30)..(30): n stands for inosine
  misc_feature (37)..(37): n stands for inverted deoxyabasic derivative

SEQ ID NO: 6367 - RNA, 37 nt, Artificial Sequence; identical to SEQ ID NO: 6271
  Description of Artificial Sequence:  Enzymatic Nucleic Acid
  misc_feature (1)..(4): Phosphorothioate 3'-Internucleotide Linkage
  misc_feature (1)..(8): 2'-O-Methyl
  misc_feature (14)..(26): 2'-O-Methyl
  misc_feature (28)..(29): 2'-O-Methyl
  misc_feature (31)..(36): 2'-O-Methyl
  misc_feature (9)..(9): 2'-deoxy-2'-amino
  misc_feature (12)..(12): 2'-deoxy-2'-amino
  misc_feature (30)..(30): n stands for inosine
  misc_feature (37)..(37): n stands for inverted deoxyabasic derivative

SEQ ID NO: 6368 - RNA, 37 nt, Artificial Sequence; identical to SEQ ID NO: 6272
  Description of Artificial Sequence:  Enzymatic Nucleic Acid
  misc_feature (1)..(4): Phosphorothioate 3'-Internucleotide Linkage
  misc_feature (1)..(8): 2'-O-Methyl
  misc_feature (14)..(26): 2'-O-Methyl
  misc_feature (28)..(29): 2'-O-Methyl
  misc_feature (31)..(36): 2'-O-Methyl
  misc_feature (9)..(9): 2'-deoxy-2'-amino
  misc_feature (12)..(12): 2'-deoxy-2'-amino
  misc_feature (30)..(30): n stands for inosine
  misc_feature (37)..(37): n stands for inverted deoxyabasic derivative

SEQ ID NO: 6369 - RNA, 37 nt, Artificial Sequence; identical to SEQ ID NO: 6273
  Description of Artificial Sequence:  Enzymatic Nucleic Acid
  misc_feature (1)..(4): Phosphorothioate 3'-Internucleotide Linkage
  misc_feature (1)..(8): 2'-O-Methyl
  misc_feature (14)..(26): 2'-O-Methyl
  misc_feature (28)..(29): 2'-O-Methyl
  misc_feature (31)..(36): 2'-O-Methyl
  misc_feature (9)..(9): 2'-deoxy-2'-amino
  misc_feature (12)..(12): 2'-deoxy-2'-amino
  misc_feature (30)..(30): n stands for inosine
  misc_feature (37)..(37): n stands for inverted deoxyabasic derivative

SEQ ID NO: 6370 - RNA, 37 nt, Artificial Sequence; identical to SEQ ID NO: 6274
  Description of Artificial Sequence:  Enzymatic Nucleic Acid
  misc_feature (1)..(4): Phosphorothioate 3'-Internucleotide Linkage
  misc_feature (1)..(8): 2'-O-Methyl
  misc_feature (14)..(26): 2'-O-Methyl
  misc_feature (28)..(29): 2'-O-Methyl
  misc_feature (31)..(36): 2'-O-Methyl
  misc_feature (9)..(9): 2'-deoxy-2'-amino
  misc_feature (12)..(12): 2'-deoxy-2'-amino
  misc_feature (30)..(30): n stands for inosine
  misc_feature (37)..(37): n stands for inverted deoxyabasic derivative

SEQ ID NO: 6371 - RNA, 37 nt, Artificial Sequence; identical to SEQ ID NO: 6275
  Description of Artificial Sequence:  Enzymatic Nucleic Acid
  misc_feature (1)..(4): Phosphorothioate 3'-Internucleotide Linkage
  misc_feature (1)..(8): 2'-O-Methyl
  misc_feature (14)..(26): 2'-O-Methyl
  misc_feature (28)..(29): 2'-O-Methyl
  misc_feature (31)..(36): 2'-O-Methyl
  misc_feature (9)..(9): 2'-deoxy-2'-amino
  misc_feature (12)..(12): 2'-deoxy-2'-amino
  misc_feature (30)..(30): n stands for inosine
  misc_feature (37)..(37): n stands for inverted deoxyabasic derivative

SEQ ID NO: 6372 - RNA, 37 nt, Artificial Sequence; identical to SEQ ID NO: 6276
  Description of Artificial Sequence:  Enzymatic Nucleic Acid
  misc_feature (1)..(4): Phosphorothioate 3'-Internucleotide Linkage
  misc_feature (1)..(8): 2'-O-Methyl
  misc_feature (14)..(26): 2'-O-Methyl
  misc_feature (28)..(29): 2'-O-Methyl
  misc_feature (31)..(36): 2'-O-Methyl
  misc_feature (9)..(9): 2'-deoxy-2'-amino
  misc_feature (12)..(12): 2'-deoxy-2'-amino
  misc_feature (30)..(30): n stands for inosine
  misc_feature (37)..(37): n stands for inverted deoxyabasic derivative

SEQ ID NO: 6373 - RNA, 37 nt, Artificial Sequence; identical to SEQ ID NO: 6277
  Description of Artificial Sequence:  Enzymatic Nucleic Acid
  misc_feature (1)..(4): Phosphorothioate 3'-Internucleotide Linkage
  misc_feature (1)..(8): 2'-O-Methyl
  misc_feature (14)..(26): 2'-O-Methyl
  misc_feature (28)..(29): 2'-O-Methyl
  misc_feature (31)..(36): 2'-O-Methyl
  misc_feature (9)..(9): 2'-deoxy-2'-amino
  misc_feature (12)..(12): 2'-deoxy-2'-amino
  misc_feature (30)..(30): n stands for inosine
  misc_feature (37)..(37): n stands for inverted deoxyabasic derivative

SEQ ID NO: 6374 - RNA, 37 nt, Artificial Sequence; identical to SEQ ID NO: 6278
  Description of Artificial Sequence:  Enzymatic Nucleic Acid
  misc_feature (1)..(4): Phosphorothioate 3'-Internucleotide Linkage
  misc_feature (1)..(8): 2'-O-Methyl
  misc_feature (14)..(26): 2'-O-Methyl
  misc_feature (28)..(29): 2'-O-Methyl
  misc_feature (31)..(36): 2'-O-Methyl
  misc_feature (9)..(9): 2'-deoxy-2'-amino
  misc_feature (12)..(12): 2'-deoxy-2'-amino
  misc_feature (30)..(30): n stands for inosine
  misc_feature (37)..(37): n stands for inverted deoxyabasic derivative

SEQ ID NO: 6375 - RNA, 37 nt, Artificial Sequence; identical to SEQ ID NO: 6279
  Description of Artificial Sequence:  Enzymatic Nucleic Acid
  misc_feature (1)..(4): Phosphorothioate 3'-Internucleotide Linkage
  misc_feature (1)..(8): 2'-O-Methyl
  misc_feature (14)..(26): 2'-O-Methyl
  misc_feature (28)..(29): 2'-O-Methyl
  misc_feature (31)..(36): 2'-O-Methyl
  misc_feature (9)..(9): 2'-deoxy-2'-amino
  misc_feature (12)..(12): 2'-deoxy-2'-amino
  misc_feature (30)..(30): n stands for inosine
  misc_feature (37)..(37): n stands for inverted deoxyabasic derivative

SEQ ID NO: 6376 - RNA, 37 nt, Artificial Sequence; identical to SEQ ID NO: 6280
  Description of Artificial Sequence:  Enzymatic Nucleic Acid
  misc_feature (1)..(4): Phosphorothioate 3'-Internucleotide Linkage
  misc_feature (1)..(8): 2'-O-Methyl
  misc_feature (14)..(26): 2'-O-Methyl
  misc_feature (28)..(29): 2'-O-Methyl
  misc_feature (31)..(36): 2'-O-Methyl
  misc_feature (9)..(9): 2'-deoxy-2'-amino
  misc_feature (12)..(12): 2'-deoxy-2'-amino
  misc_feature (30)..(30): n stands for inosine
  misc_feature (37)..(37): n stands for inverted deoxyabasic derivative

SEQ ID NO: 6377 - RNA, 37 nt, Artificial Sequence; identical to SEQ ID NO: 6281
  Description of Artificial Sequence:  Enzymatic Nucleic Acid
  misc_feature (1)..(4): Phosphorothioate 3'-Internucleotide Linkage
  misc_feature (1)..(8): 2'-O-Methyl
  misc_feature (14)..(26): 2'-O-Methyl
  misc_feature (28)..(29): 2'-O-Methyl
  misc_feature (31)..(36): 2'-O-Methyl
  misc_feature (9)..(9): 2'-deoxy-2'-amino
  misc_feature (12)..(12): 2'-deoxy-2'-amino
  misc_feature (30)..(30): n stands for inosine
  misc_feature (37)..(37): n stands for inverted deoxyabasic derivative

SEQ ID NO: 6378 - RNA, 37 nt, Artificial Sequence; identical to SEQ ID NO: 6282
  Description of Artificial Sequence:  Enzymatic Nucleic Acid
  misc_feature (1)..(4): Phosphorothioate 3'-Internucleotide Linkage
  misc_feature (1)..(8): 2'-O-Methyl
  misc_feature (14)..(26): 2'-O-Methyl
  misc_feature (28)..(29): 2'-O-Methyl
  misc_feature (31)..(36): 2'-O-Methyl
  misc_feature (9)..(9): 2'-deoxy-2'-amino
  misc_feature (12)..(12): 2'-deoxy-2'-amino
  misc_feature (30)..(30): n stands for inosine
  misc_feature (37)..(37): n stands for inverted deoxyabasic derivative

SEQ ID NO: 6379 - RNA, 37 nt, Artificial Sequence; identical to SEQ ID NO: 6283
  Description of Artificial Sequence:  Enzymatic Nucleic Acid
  misc_feature (1)..(4): Phosphorothioate 3'-Internucleotide Linkage
  misc_feature (1)..(8): 2'-O-Methyl
  misc_feature (14)..(26): 2'-O-Methyl
  misc_feature (28)..(29): 2'-O-Methyl
  misc_feature (31)..(36): 2'-O-Methyl
  misc_feature (9)..(9): 2'-deoxy-2'-amino
  misc_feature (12)..(12): 2'-deoxy-2'-amino
  misc_feature (30)..(30): n stands for inosine
  misc_feature (37)..(37): n stands for inverted deoxyabasic derivative

SEQ ID NO: 6380 - RNA, 37 nt, Artificial Sequence; identical to SEQ ID NO: 6284
  Description of Artificial Sequence:  Enzymatic Nucleic Acid
  misc_feature (1)..(4): Phosphorothioate 3'-Internucleotide Linkage
  misc_feature (1)..(8): 2'-O-Methyl
  misc_feature (14)..(26): 2'-O-Methyl
  misc_feature (28)..(29): 2'-O-Methyl
  misc_feature (31)..(36): 2'-O-Methyl
  misc_feature (9)..(9): 2'-deoxy-2'-amino
  misc_feature (12)..(12): 2'-deoxy-2'-amino
  misc_feature (30)..(30): n stands for inosine
  misc_feature (37)..(37): n stands for inverted deoxyabasic derivative

SEQ ID NO: 6381 - RNA, 37 nt, Artificial Sequence; identical to SEQ ID NO: 6285
  Description of Artificial Sequence:  Enzymatic Nucleic Acid
  misc_feature (1)..(4): Phosphorothioate 3'-Internucleotide Linkage
  misc_feature (1)..(8): 2'-O-Methyl
  misc_feature (14)..(26): 2'-O-Methyl
  misc_feature (28)..(29): 2'-O-Methyl
  misc_feature (31)..(36): 2'-O-Methyl
  misc_feature (9)..(9): 2'-deoxy-2'-amino
  misc_feature (12)..(12): 2'-deoxy-2'-amino
  misc_feature (30)..(30): n stands for inosine
  misc_feature (37)..(37): n stands for inverted deoxyabasic derivative

SEQ ID NO: 6382 - RNA, 37 nt, Artificial Sequence; identical to SEQ ID NO: 6286
  Description of Artificial Sequence:  Enzymatic Nucleic Acid
  misc_feature (1)..(4): Phosphorothioate 3'-Internucleotide Linkage
  misc_feature (1)..(8): 2'-O-Methyl
  misc_feature (14)..(26): 2'-O-Methyl
  misc_feature (28)..(29): 2'-O-Methyl
  misc_feature (31)..(36): 2'-O-Methyl
  misc_feature (9)..(9): 2'-deoxy-2'-amino
  misc_feature (12)..(12): 2'-deoxy-2'-amino
  misc_feature (30)..(30): n stands for inosine
  misc_feature (37)..(37): n stands for inverted deoxyabasic derivative

SEQ ID NO: 6383 - RNA, 37 nt, Artificial Sequence; identical to SEQ ID NO: 6287
  Description of Artificial Sequence:  Enzymatic Nucleic Acid
  misc_feature (1)..(4): Phosphorothioate 3'-Internucleotide Linkage
  misc_feature (1)..(8): 2'-O-Methyl
  misc_feature (14)..(26): 2'-O-Methyl
  misc_feature (28)..(29): 2'-O-Methyl
  misc_feature (31)..(36): 2'-O-Methyl
  misc_feature (9)..(9): 2'-deoxy-2'-amino
  misc_feature (12)..(12): 2'-deoxy-2'-amino
  misc_feature (30)..(30): n stands for inosine
  misc_feature (37)..(37): n stands for inverted deoxyabasic derivative

SEQ ID NO: 6384 - RNA, 36 nt, Artificial Sequence
  Description of Artificial Sequence:  Enzymatic Nucleic Acid
  misc_feature (1)..(3): Phosphorothioate 3'-Internucleotide Linkage
  misc_feature (8)..(8): Phosphorothioate 3'-Internucleotide Linkage
  misc_feature (1)..(5): 2'-O-Methyl
  misc_feature (9)..(13): 2'-O-Methyl
  misc_feature (15)..(35): 2'-O-Methyl
  misc_feature (36)..(36): n stands for inverted deoxyabasic derivative
gacgugauggcaugcacuaugcgcggaauuuuggcn

SEQ ID NO: 6385 - RNA, 36 nt, Artificial Sequence
  Description of Artificial Sequence:  Enzymatic Nucleic Acid
  misc_feature (1)..(3): Phosphorothioate 3'-Internucleotide Linkage
  misc_feature (8)..(8): Phosphorothioate 3'-Internucleotide Linkage
  misc_feature (1)..(5): 2'-O-Methyl
  misc_feature (9)..(13): 2'-O-Methyl
  misc_feature (15)..(35): 2'-O-Methyl
  misc_feature (36)..(36): n stands for inverted deoxyabasic derivative
agaaugauggcaugcacuaugcgcgauccagcgaun

SEQ ID NO: 6386 - RNA, 36 nt, Artificial Sequence
  Description of Artificial Sequence:  Enzymatic Nucleic Acid
  misc_feature (1)..(3): Phosphorothioate 3'-Internucleotide Linkage
  misc_feature (8)..(8): Phosphorothioate 3'-Internucleotide Linkage
  misc_feature (1)..(5): 2'-O-Methyl
  misc_feature (9)..(13): 2'-O-Methyl
  misc_feature (15)..(35): 2'-O-Methyl
  misc_feature (36)..(36): n stands for inverted deoxyabasic derivative
gagaugauggcaugcacuaugcgcgaaacgggcaan

SEQ ID NO: 6387 - RNA, 36 nt, Artificial Sequence
  Description of Artificial Sequence:  Enzymatic Nucleic Acid
  misc_feature (1)..(3): Phosphorothioate 3'-Internucleotide Linkage
  misc_feature (8)..(8): Phosphorothioate 3'-Internucleotide Linkage
  misc_feature (1)..(5): 2'-O-Methyl
  misc_feature (9)..(13): 2'-O-Methyl
  misc_feature (15)..(35): 2'-O-Methyl
  misc_feature (36)..(36): n stands for inverted deoxyabasic derivative
cugaugauggcaugcacuaugcgcgaaauggcacun

SEQ ID NO: 6388 - RNA, 36 nt, Artificial Sequence
  Description of Artificial Sequence:  Enzymatic Nucleic Acid
  misc_feature (1)..(3): Phosphorothioate 3'-Internucleotide Linkage
  misc_feature (8)..(8): Phosphorothioate 3'-Internucleotide Linkage
  misc_feature (1)..(5): 2'-O-Methyl
  misc_feature (9)..(13): 2'-O-Methyl
  misc_feature (15)..(35): 2'-O-Methyl
  misc_feature (36)..(36): n stands for inverted deoxyabasic derivative
ugguugauggcaugcacuaugcgcgggcagaggagn

SEQ ID NO: 6389 - RNA, 36 nt, Artificial Sequence
  Description of Artificial Sequence:  Enzymatic Nucleic Acid
  misc_feature (1)..(3): Phosphorothioate 3'-Internucleotide Linkage
  misc_feature (8)..(8): Phosphorothioate 3'-Internucleotide Linkage
  misc_feature (1)..(5): 2'-O-Methyl
  misc_feature (9)..(13): 2'-O-Methyl
  misc_feature (15)..(35): 2'-O-Methyl
  misc_feature (36)..(36): n stands for inverted deoxyabasic derivative
acggugauggcaugcacuaugcgcgagaggugaagn

SEQ ID NO: 6390 - RNA, 36 nt, Artificial Sequence
  Description of Artificial Sequence:  Enzymatic Nucleic Acid
  misc_feature (1)..(3): Phosphorothioate 3'-Internucleotide Linkage
  misc_feature (8)..(8): Phosphorothioate 3'-Internucleotide Linkage
  misc_feature (1)..(5): 2'-O-Methyl
  misc_feature (9)..(13): 2'-O-Methyl
  misc_feature (15)..(35): 2'-O-Methyl
  misc_feature (36)..(36): n stands for inverted deoxyabasic derivative
aggaugauggcaugcacuaugcgcgagcuuggaggn

SEQ ID NO: 6391 - RNA, 36 nt, Artificial Sequence
  Description of Artificial Sequence:  Enzymatic Nucleic Acid
  misc_feature (1)..(3): Phosphorothioate 3'-Internucleotide Linkage
  misc_feature (8)..(8): Phosphorothioate 3'-Internucleotide Linkage
  misc_feature (1)..(5): 2'-O-Methyl
  misc_feature (9)..(13): 2'-O-Methyl
  misc_feature (15)..(35): 2'-O-Methyl
  misc_feature (36)..(36): n stands for inverted deoxyabasic derivative
caagugauggcaugcacuaugcgcgacagcuuggan

SEQ ID NO: 6392 - RNA, 36 nt, Artificial Sequence
  Description of Artificial Sequence:  Enzymatic Nucleic Acid
  misc_feature (1)..(3): Phosphorothioate 3'-Internucleotide Linkage
  misc_feature (8)..(8): Phosphorothioate 3'-Internucleotide Linkage
  misc_feature (1)..(5): 2'-O-Methyl
  misc_feature (9)..(13): 2'-O-Methyl
  misc_feature (15)..(35): 2'-O-Methyl
  misc_feature (36)..(36): n stands for inverted deoxyabasic derivative
cgagugauggcaugcacuaugcgcggagggaguucn

SEQ ID NO: 6393 - RNA, 36 nt, Artificial Sequence
  Description of Artificial Sequence:  Enzymatic Nucleic Acid
  misc_feature (1)..(4): Phosphorothioate 3'-Internucleotide Linkage
  misc_feature (1)..(7): 2'-O-Methyl
  misc_feature (9)..(15): 2'-O-Methyl
  misc_feature (19)..(19): 2'-O-Methyl
  misc_feature (21)..(23): 2'-O-Methyl
  misc_feature (26)..(26): 2'-O-Methyl
  misc_feature (28)..(35): 2'-O-Methyl
  misc_feature (17)..(17): 2'-deoxy-2'-amino
  misc_feature (27)..(27): 2'-deoxy-2'-amino
  misc_feature (36)..(36): n stands for inverted deoxyabasic derivative
gcagacagccgaaaggcgagugaggucuauccagcn

SEQ ID NO: 6394 - RNA, 36 nt, Artificial Sequence
  Description of Artificial Sequence:  Enzymatic Nucleic Acid
  misc_feature (1)..(4): Phosphorothioate 3'-Internucleotide Linkage
  misc_feature (1)..(7): 2'-O-Methyl
  misc_feature (9)..(15): 2'-O-Methyl
  misc_feature (19)..(19): 2'-O-Methyl
  misc_feature (21)..(23): 2'-O-Methyl
  misc_feature (26)..(26): 2'-O-Methyl
  misc_feature (28)..(35): 2'-O-Methyl
  misc_feature (17)..(17): 2'-deoxy-2'-amino
  misc_feature (27)..(27): 2'-deoxy-2'-amino
  misc_feature (36)..(36): n stands for inverted deoxyabasic derivative
gauaaaagccgaaaggcgagugaggucugccgcagn

SEQ ID NO: 6395 - RNA, 36 nt, Artificial Sequence
  Description of Artificial Sequence:  Enzymatic Nucleic Acid
  misc_feature (1)..(4): Phosphorothioate 3'-Internucleotide Linkage
  misc_feature (1)..(7): 2'-O-Methyl
  misc_feature (9)..(15): 2'-O-Methyl
  misc_feature (19)..(19): 2'-O-Methyl
  misc_feature (21)..(23): 2'-O-Methyl
  misc_feature (26)..(26): 2'-O-Methyl
  misc_feature (28)..(35): 2'-O-Methyl
  misc_feature (17)..(17): 2'-deoxy-2'-amino
  misc_feature (27)..(27): 2'-deoxy-2'-amino
  misc_feature (36)..(36): n stands for inverted deoxyabasic derivative
ggcauaggccgaaaggcgagugaggucuagcaggan

SEQ ID NO: 6396 - RNA, 36 nt, Artificial Sequence
  Description of Artificial Sequence:  Enzymatic Nucleic Acid
  misc_feature (1)..(4): Phosphorothioate 3'-Internucleotide Linkage
  misc_feature (1)..(7): 2'-O-Methyl
  misc_feature (9)..(15): 2'-O-Methyl
  misc_feature (19)..(19): 2'-O-Methyl
  misc_feature (21)..(23): 2'-O-Methyl
  misc_feature (26)..(26): 2'-O-Methyl
  misc_feature (28)..(35): 2'-O-Methyl
  misc_feature (17)..(17): 2'-deoxy-2'-amino
  misc_feature (27)..(27): 2'-deoxy-2'-amino
  misc_feature (36)..(36): n stands for inverted deoxyabasic derivative
aggcccagccgaaaggcgagugaggucuucccauan

SEQ ID NO: 6397 - RNA, 36 nt, Artificial Sequence
  Description of Artificial Sequence:  Enzymatic Nucleic Acid
  misc_feature (1)..(4): Phosphorothioate 3'-Internucleotide Linkage
  misc_feature (1)..(7): 2'-O-Methyl
  misc_feature (9)..(15): 2'-O-Methyl
  misc_feature (19)..(19): 2'-O-Methyl
  misc_feature (21)..(23): 2'-O-Methyl
  misc_feature (26)..(26): 2'-O-Methyl
  misc_feature (28)..(35): 2'-O-Methyl
  misc_feature (17)..(17): 2'-deoxy-2'-amino
  misc_feature (27)..(27): 2'-deoxy-2'-amino
  misc_feature (36)..(36): n stands for inverted deoxyabasic derivative
gggaaaggccgaaaggcgagugaggucuccuacgan

SEQ ID NO: 6398 - RNA, 36 nt, Artificial Sequence
  Description of Artificial Sequence:  Enzymatic Nucleic Acid
  misc_feature (1)..(4): Phosphorothioate 3'-Internucleotide Linkage
  misc_feature (1)..(7): 2'-O-Methyl
  misc_feature (9)..(15): 2'-O-Methyl
  misc_feature (19)..(19): 2'-O-Methyl
  misc_feature (21)..(23): 2'-O-Methyl
  misc_feature (26)..(26): 2'-O-Methyl
  misc_feature (28)..(35): 2'-O-Methyl
  misc_feature (17)..(17): 2'-deoxy-2'-amino
  misc_feature (27)..(27): 2'-deoxy-2'-amino
  misc_feature (36)..(36): n stands for inverted deoxyabasic derivative
ggaucgggccgaaaggcgagugaggucuagaggagn

SEQ ID NO: 6399 - RNA, 36 nt, Artificial Sequence
  Description of Artificial Sequence:  Enzymatic Nucleic Acid
  misc_feature (1)..(4): Phosphorothioate 3'-Internucleotide Linkage
  misc_feature (1)..(7): 2'-O-Methyl
  misc_feature (9)..(15): 2'-O-Methyl
  misc_feature (19)..(19): 2'-O-Methyl
  misc_feature (21)..(23): 2'-O-Methyl
  misc_feature (26)..(26): 2'-O-Methyl
  misc_feature (28)..(35): 2'-O-Methyl
  misc_feature (17)..(17): 2'-deoxy-2'-amino
  misc_feature (27)..(27): 2'-deoxy-2'-amino
  misc_feature (36)..(36): n stands for inverted deoxyabasic derivative
gauuagggccgaaaggcgagugaggucuagaggugn

SEQ ID NO: 6400 - RNA, 36 nt, Artificial Sequence
  Description of Artificial Sequence:  Enzymatic Nucleic Acid
  misc_feature (1)..(4): Phosphorothioate 3'-Internucleotide Linkage
  misc_feature (1)..(7): 2'-O-Methyl
  misc_feature (9)..(15): 2'-O-Methyl
  misc_feature (19)..(19): 2'-O-Methyl
  misc_feature (21)..(23): 2'-O-Methyl
  misc_feature (26)..(26): 2'-O-Methyl
  misc_feature (28)..(35): 2'-O-Methyl
  misc_feature (17)..(17): 2'-deoxy-2'-amino
  misc_feature (27)..(27): 2'-deoxy-2'-amino
  misc_feature (36)..(36): n stands for inverted deoxyabasic derivative
ugcgagggccgaaaggcgagugaggucugagggagn

SEQ ID NO: 6401 - RNA, 36 nt, Artificial Sequence
  Description of Artificial Sequence:  Enzymatic Nucleic Acid
  misc_feature (1)..(4): Phosphorothioate 3'-Internucleotide Linkage
  misc_feature (1)..(7): 2'-O-Methyl
  misc_feature (9)..(15): 2'-O-Methyl
  misc_feature (19)..(19): 2'-O-Methyl
  misc_feature (21)..(23): 2'-O-Methyl
  misc_feature (26)..(26): 2'-O-Methyl
  misc_feature (28)..(35): 2'-O-Methyl
  misc_feature (17)..(17): 2'-deoxy-2'-amino
  misc_feature (27)..(27): 2'-deoxy-2'-amino
  misc_feature (36)..(36): n stands for inverted deoxyabasic derivative
acacgaggccgaaaggcgagugaggucuaggggucn

SEQ ID NO: 6402 - RNA, 36 nt, Artificial Sequence
  Description of Artificial Sequence:  Enzymatic Nucleic Acid
  misc_feature (1)..(4): Phosphorothioate 3'-Internucleotide Linkage
  misc_feature (1)..(7): 2'-O-Methyl
  misc_feature (9)..(15): 2'-O-Methyl
  misc_feature (19)..(19): 2'-O-Methyl
  misc_feature (21)..(23): 2'-O-Methyl
  misc_feature (26)..(26): 2'-O-Methyl
  misc_feature (28)..(35): 2'-O-Methyl
  misc_feature (17)..(17): 2'-deoxy-2'-amino
  misc_feature (27)..(27): 2'-deoxy-2'-amino
  misc_feature (36)..(36): n stands for inverted deoxyabasic derivative
ccuguaagccgaaaggcgagugaggucuacgagcan

SEQ ID NO: 6403 - RNA, 36 nt, Artificial Sequence
  Description of Artificial Sequence:  Enzymatic Nucleic Acid
  misc_feature (1)..(4): Phosphorothioate 3'-Internucleotide Linkage
  misc_feature (1)..(7): 2'-O-Methyl
  misc_feature (9)..(15): 2'-O-Methyl
  misc_feature (19)..(19): 2'-O-Methyl
  misc_feature (21)..(23): 2'-O-Methyl
  misc_feature (26)..(26): 2'-O-Methyl
  misc_feature (28)..(35): 2'-O-Methyl
  misc_feature (17)..(17): 2'-deoxy-2'-amino
  misc_feature (27)..(27): 2'-deoxy-2'-amino
  misc_feature (36)..(36): n stands for inverted deoxyabasic derivative
gggacuggccgaaaggcgagugaggucugaauuuun

SEQ ID NO: 6404 - RNA, 34 nt, Artificial Sequence
  Description of Artificial Sequence:  Enzymatic Nucleic Acid
  misc_feature (1)..(4): Phosphorothioate 3'-Internucleotide Linkage
  misc_feature (1)..(6): 2'-O-Methyl
  misc_feature (8)..(14): 2'-O-Methyl
  misc_feature (18)..(18): 2'-O-Methyl
  misc_feature (20)..(22): 2'-O-Methyl
  misc_feature (25)..(25): 2'-O-Methyl
  misc_feature (27)..(33): 2'-O-Methyl
  misc_feature (16)..(16): 2'-deoxy-2'-amino
  misc_feature (26)..(26): 2'-deoxy-2'-amino
  misc_feature (34)..(34): n stands for inverted deoxyabasic derivative
cgcagagccgaaaggcgagugaggucuacauccn

SEQ ID NO: 6405 - RNA, 36 nt, Artificial Sequence
  Description of Artificial Sequence:  Enzymatic Nucleic Acid
  misc_feature (1)..(4): Phosphorothioate 3'-Internucleotide Linkage
  misc_feature (1)..(7): 2'-O-Methyl
  misc_feature (9)..(15): 2'-O-Methyl
  misc_feature (19)..(19): 2'-O-Methyl
  misc_feature (21)..(23): 2'-O-Methyl
  misc_feature (26)..(26): 2'-O-Methyl
  misc_feature (28)..(35): 2'-O-Methyl
  misc_feature (17)..(17): 2'-deoxy-2'-amino
  misc_feature (27)..(27): 2'-deoxy-2'-amino
  misc_feature (36)..(36): n stands for inverted deoxyabasic derivative
ccgcagagccgaaaggcgagugaggucuacauccan

SEQ ID NO: 6406 - RNA, 34 nt, Artificial Sequence
  Description of Artificial Sequence:  Enzymatic Nucleic Acid
  misc_feature (1)..(4): Phosphorothioate 3'-Internucleotide Linkage
  misc_feature (1)..(6): 2'-O-Methyl
  misc_feature (8)..(14): 2'-O-Methyl
  misc_feature (18)..(18): 2'-O-Methyl
  misc_feature (20)..(22): 2'-O-Methyl
  misc_feature (25)..(25): 2'-O-Methyl
  misc_feature (27)..(33): 2'-O-Methyl
  misc_feature (16)..(16): 2'-deoxy-2'-amino
  misc_feature (26)..(26): 2'-deoxy-2'-amino
  misc_feature (34)..(34): n stands for inverted deoxyabasic derivative
acgccggccgaaaggcgagugaggucuagacacn

SEQ ID NO: 6407 - RNA, 36 nt, Artificial Sequence
  Description of Artificial Sequence:  Enzymatic Nucleic Acid
  misc_feature (1)..(4): Phosphorothioate 3'-Internucleotide Linkage
  misc_feature (1)..(7): 2'-O-Methyl
  misc_feature (9)..(15): 2'-O-Methyl
  misc_feature (19)..(19): 2'-O-Methyl
  misc_feature (21)..(23): 2'-O-Methyl
  misc_feature (26)..(26): 2'-O-Methyl
  misc_feature (28)..(35): 2'-O-Methyl
  misc_feature (17)..(17): 2'-deoxy-2'-amino
  misc_feature (27)..(27): 2'-deoxy-2'-amino
  misc_feature (36)..(36): n stands for inverted deoxyabasic derivative
uaaaacggccgaaaggcgagugaggucucgcagacn

SEQ ID NO: 6408 - RNA, 34 nt, Artificial Sequence
  Description of Artificial Sequence:  Enzymatic Nucleic Acid
  misc_feature (1)..(4): Phosphorothioate 3'-Internucleotide Linkage
  misc_feature (1)..(6): 2'-O-Methyl
  misc_feature (8)..(14): 2'-O-Methyl
  misc_feature (18)..(18): 2'-O-Methyl
  misc_feature (20)..(22): 2'-O-Methyl
  misc_feature (25)..(25): 2'-O-Methyl
  misc_feature (27)..(33): 2'-O-Methyl
  misc_feature (16)..(16): 2'-deoxy-2'-amino
  misc_feature (26)..(26): 2'-deoxy-2'-amino
  misc_feature (34)..(34): n stands for inverted deoxyabasic derivative
auaaaagccgaaaggcgagugaggucugccgcan

SEQ ID NO: 6409 - RNA, 34 nt, Artificial Sequence
  Description of Artificial Sequence:  Enzymatic Nucleic Acid
  misc_feature (1)..(4): Phosphorothioate 3'-Internucleotide Linkage
  misc_feature (1)..(6): 2'-O-Methyl
  misc_feature (8)..(14): 2'-O-Methyl
  misc_feature (18)..(18): 2'-O-Methyl
  misc_feature (20)..(22): 2'-O-Methyl
  misc_feature (25)..(25): 2'-O-Methyl
  misc_feature (27)..(33): 2'-O-Methyl
  misc_feature (16)..(16): 2'-deoxy-2'-amino
  misc_feature (26)..(26): 2'-deoxy-2'-amino
  misc_feature (34)..(34): n stands for inverted deoxyabasic derivative
augagggccgaaaggcgagugaggucuauagcan

SEQ ID NO: 6410 - RNA, 36 nt, Artificial Sequence
  Description of Artificial Sequence:  Enzymatic Nucleic Acid
  misc_feature (1)..(4): Phosphorothioate 3'-Internucleotide Linkage
  misc_feature (1)..(7): 2'-O-Methyl
  misc_feature (9)..(15): 2'-O-Methyl
  misc_feature (19)..(19): 2'-O-Methyl
  misc_feature (21)..(23): 2'-O-Methyl
  misc_feature (26)..(26): 2'-O-Methyl
  misc_feature (28)..(35): 2'-O-Methyl
  misc_feature (17)..(17): 2'-deoxy-2'-amino
  misc_feature (27)..(27): 2'-deoxy-2'-amino
  misc_feature (36)..(36): n stands for inverted deoxyabasic derivative
gaugagggccgaaaggcgagugaggucuauagcagn

SEQ ID NO: 6411 - RNA, 36 nt, Artificial Sequence
  Description of Artificial Sequence:  Enzymatic Nucleic Acid
  misc_feature (1)..(4): Phosphorothioate 3'-Internucleotide Linkage
  misc_feature (1)..(7): 2'-O-Methyl
  misc_feature (9)..(15): 2'-O-Methyl
  misc_feature (19)..(19): 2'-O-Methyl
  misc_feature (21)..(23): 2'-O-Methyl
  misc_feature (26)..(26): 2'-O-Methyl
  misc_feature (28)..(35): 2'-O-Methyl
  misc_feature (17)..(17): 2'-deoxy-2'-amino
  misc_feature (27)..(27): 2'-deoxy-2'-amino
  misc_feature (36)..(36): n stands for inverted deoxyabasic derivative
aaacggggccgaaaggcgagugaggucuaacauacn

SEQ ID NO: 6412 - RNA, 36 nt, Artificial Sequence
  Description of Artificial Sequence:  Enzymatic Nucleic Acid
  misc_feature (1)..(4): Phosphorothioate 3'-Internucleotide Linkage
  misc_feature (1)..(7): 2'-O-Methyl
  misc_feature (9)..(15): 2'-O-Methyl
  misc_feature (19)..(19): 2'-O-Methyl
  misc_feature (21)..(23): 2'-O-Methyl
  misc_feature (26)..(26): 2'-O-Methyl
  misc_feature (28)..(35): 2'-O-Methyl
  misc_feature (17)..(17): 2'-deoxy-2'-amino
  misc_feature (27)..(27): 2'-deoxy-2'-amino
  misc_feature (36)..(36): n stands for inverted deoxyabasic derivative
uagaggagccgaaaggcgagugaggucuaaacgggn

SEQ ID NO: 6413 - RNA, 34 nt, Artificial Sequence
  Description of Artificial Sequence:  Enzymatic Nucleic Acid
  misc_feature (1)..(4): Phosphorothioate 3'-Internucleotide Linkage
  misc_feature (1)..(6): 2'-O-Methyl
  misc_feature (8)..(14): 2'-O-Methyl
  misc_feature (18)..(18): 2'-O-Methyl
  misc_feature (20)..(22): 2'-O-Methyl
  misc_feature (25)..(25): 2'-O-Methyl
  misc_feature (27)..(33): 2'-O-Methyl
  misc_feature (16)..(16): 2'-deoxy-2'-amino
  misc_feature (26)..(26): 2'-deoxy-2'-amino
  misc_feature (34)..(34): n stands for inverted deoxyabasic derivative
ggcccagccgaaaggcgagugaggucuucccaun

SEQ ID NO: 6414 - RNA, 36 nt, Artificial Sequence
  Description of Artificial Sequence:  Enzymatic Nucleic Acid
  misc_feature (1)..(4): Phosphorothioate 3'-Internucleotide Linkage
  misc_feature (1)..(7): 2'-O-Methyl
  misc_feature (9)..(15): 2'-O-Methyl
  misc_feature (19)..(19): 2'-O-Methyl
  misc_feature (21)..(23): 2'-O-Methyl
  misc_feature (26)..(26): 2'-O-Methyl
  misc_feature (28)..(35): 2'-O-Methyl
  misc_feature (17)..(17): 2'-deoxy-2'-amino
  misc_feature (27)..(27): 2'-deoxy-2'-amino
  misc_feature (36)..(36): n stands for inverted deoxyabasic derivative
cacugaagccgaaaggcgagugaggucuaaauggcn

SEQ ID NO: 6415 - RNA, 36 nt, Artificial Sequence
  Description of Artificial Sequence:  Enzymatic Nucleic Acid
  misc_feature (1)..(4): Phosphorothioate 3'-Internucleotide Linkage
  misc_feature (1)..(7): 2'-O-Methyl
  misc_feature (9)..(15): 2'-O-Methyl
  misc_feature (19)..(19): 2'-O-Methyl
  misc_feature (21)..(23): 2'-O-Methyl
  misc_feature (26)..(26): 2'-O-Methyl
  misc_feature (28)..(35): 2'-O-Methyl
  misc_feature (17)..(17): 2'-deoxy-2'-amino
  misc_feature (27)..(27): 2'-deoxy-2'-amino
  misc_feature (36)..(36): n stands for inverted deoxyabasic derivative
cgaaccagccgaaaggcgagugaggucuugaacaan

SEQ ID NO: 6416 - RNA, 34 nt, Artificial Sequence
  Description of Artificial Sequence:  Enzymatic Nucleic Acid
  misc_feature (1)..(4): Phosphorothioate 3'-Internucleotide Linkage
  misc_feature (1)..(6): 2'-O-Methyl
  misc_feature (8)..(14): 2'-O-Methyl
  misc_feature (18)..(18): 2'-O-Methyl
  misc_feature (20)..(22): 2'-O-Methyl
  misc_feature (25)..(25): 2'-O-Methyl
  misc_feature (27)..(33): 2'-O-Methyl
  misc_feature (16)..(16): 2'-deoxy-2'-amino
  misc_feature (26)..(26): 2'-deoxy-2'-amino
  misc_feature (34)..(34): n stands for inverted deoxyabasic derivative
gaucgggccgaaaggcgagugaggucuagaggan

SEQ ID NO: 6417 - RNA, 36 nt, Artificial Sequence
  Description of Artificial Sequence:  Enzymatic Nucleic Acid
  misc_feature (1)..(4): Phosphorothioate 3'-Internucleotide Linkage
  misc_feature (1)..(7): 2'-O-Methyl
  misc_feature (9)..(15): 2'-O-Methyl
  misc_feature (19)..(19): 2'-O-Methyl
  misc_feature (21)..(23): 2'-O-Methyl
  misc_feature (26)..(26): 2'-O-Methyl
  misc_feature (28)..(35): 2'-O-Methyl
  misc_feature (17)..(17): 2'-deoxy-2'-amino
  misc_feature (27)..(27): 2'-deoxy-2'-amino
  misc_feature (36)..(36): n stands for inverted deoxyabasic derivative
uucagcggccgaaaggcgagugaggucucgacgggn

SEQ ID NO: 6418 - RNA, 34 nt, Artificial Sequence
  Description of Artificial Sequence:  Enzymatic Nucleic Acid
  misc_feature (1)..(4): Phosphorothioate 3'-Internucleotide Linkage
  misc_feature (1)..(6): 2'-O-Methyl
  misc_feature (8)..(14): 2'-O-Methyl
  misc_feature (18)..(18): 2'-O-Methyl
  misc_feature (20)..(22): 2'-O-Methyl
  misc_feature (25)..(25): 2'-O-Methyl
  misc_feature (27)..(33): 2'-O-Methyl
  misc_feature (16)..(16): 2'-deoxy-2'-amino
  misc_feature (26)..(26): 2'-deoxy-2'-amino
  misc_feature (34)..(34): n stands for inverted deoxyabasic derivative
ggugcggccgaaaggcgagugaggucucccgugn

SEQ ID NO: 6419 - RNA, 36 nt, Artificial Sequence
  Description of Artificial Sequence:  Enzymatic Nucleic Acid
  misc_feature (1)..(4): Phosphorothioate 3'-Internucleotide Linkage
  misc_feature (1)..(7): 2'-O-Methyl
  misc_feature (9)..(15): 2'-O-Methyl
  misc_feature (19)..(19): 2'-O-Methyl
  misc_feature (21)..(23): 2'-O-Methyl
  misc_feature (26)..(26): 2'-O-Methyl
  misc_feature (28)..(35): 2'-O-Methyl
  misc_feature (17)..(17): 2'-deoxy-2'-amino
  misc_feature (27)..(27): 2'-deoxy-2'-amino
  misc_feature (36)..(36): n stands for inverted deoxyabasic derivative
aggugcggccgaaaggcgagugaggucucccguggn

SEQ ID NO: 6420 - RNA, 36 nt, Artificial Sequence
  Description of Artificial Sequence:  Enzymatic Nucleic Acid
  misc_feature (1)..(4): Phosphorothioate 3'-Internucleotide Linkage
  misc_feature (1)..(7): 2'-O-Methyl
  misc_feature (9)..(15): 2'-O-Methyl
  misc_feature (19)..(19): 2'-O-Methyl
  misc_feature (21)..(23): 2'-O-Methyl
  misc_feature (26)..(26): 2'-O-Methyl
  misc_feature (28)..(35): 2'-O-Methyl
  misc_feature (17)..(17): 2'-deoxy-2'-amino
  misc_feature (27)..(27): 2'-deoxy-2'-amino
  misc_feature (36)..(36): n stands for inverted deoxyabasic derivative
gaaggcagccgaaaggcgagugaggucuagacgggn

SEQ ID NO: 6421 - RNA, 36 nt, Artificial Sequence
  Description of Artificial Sequence:  Enzymatic Nucleic Acid
  misc_feature (1)..(4): Phosphorothioate 3'-Internucleotide Linkage
  misc_feature (1)..(7): 2'-O-Methyl
  misc_feature (9)..(15): 2'-O-Methyl
  misc_feature (19)..(19): 2'-O-Methyl
  misc_feature (21)..(23): 2'-O-Methyl
  misc_feature (26)..(26): 2'-O-Methyl
  misc_feature (28)..(35): 2'-O-Methyl
  misc_feature (17)..(17): 2'-deoxy-2'-amino
  misc_feature (27)..(27): 2'-deoxy-2'-amino
  misc_feature (36)..(36): n stands for inverted deoxyabasic derivative
gagaagggccgaaaggcgagugaggucuacagacgn

SEQ ID NO: 6422 - RNA, 36 nt, Artificial Sequence
  Description of Artificial Sequence:  Enzymatic Nucleic Acid
  misc_feature (1)..(4): Phosphorothioate 3'-Internucleotide Linkage
  misc_feature (1)..(7): 2'-O-Methyl
  misc_feature (9)..(15): 2'-O-Methyl
  misc_feature (19)..(19): 2'-O-Methyl
  misc_feature (21)..(23): 2'-O-Methyl
  misc_feature (26)..(26): 2'-O-Methyl
  misc_feature (28)..(35): 2'-O-Methyl
  misc_feature (17)..(17): 2'-deoxy-2'-amino
  misc_feature (27)..(27): 2'-deoxy-2'-amino
  misc_feature (36)..(36): n stands for inverted deoxyabasic derivative
ggugaaggccgaaaggcgagugaggucugaagugcn

SEQ ID NO: 6423 - RNA, 34 nt, Artificial Sequence
  Description of Artificial Sequence:  Enzymatic Nucleic Acid
  misc_feature (1)..(4): Phosphorothioate 3'-Internucleotide Linkage
  misc_feature (1)..(6): 2'-O-Methyl
  misc_feature (8)..(14): 2'-O-Methyl
  misc_feature (18)..(18): 2'-O-Methyl
  misc_feature (20)..(22): 2'-O-Methyl
  misc_feature (25)..(25): 2'-O-Methyl
  misc_feature (27)..(33): 2'-O-Methyl
  misc_feature (16)..(16): 2'-deoxy-2'-amino
  misc_feature (26)..(26): 2'-deoxy-2'-amino
  misc_feature (34)..(34): n stands for inverted deoxyabasic derivative
auuagggccgaaaggcgagugaggucuagaggun

SEQ ID NO: 6424 - RNA, 36 nt, Artificial Sequence
  Description of Artificial Sequence:  Enzymatic Nucleic Acid
  misc_feature (1)..(4): Phosphorothioate 3'-Internucleotide Linkage
  misc_feature (1)..(7): 2'-O-Methyl
  misc_feature (9)..(15): 2'-O-Methyl
  misc_feature (19)..(19): 2'-O-Methyl
  misc_feature (21)..(23): 2'-O-Methyl
  misc_feature (26)..(26): 2'-O-Methyl
  misc_feature (28)..(35): 2'-O-Methyl
  misc_feature (17)..(17): 2'-deoxy-2'-amino
  misc_feature (27)..(27): 2'-deoxy-2'-amino
  misc_feature (36)..(36): n stands for inverted deoxyabasic derivative
auagggggccgaaaggcgagugaggucuauuuggun

SEQ ID NO: 6425 - RNA, 36 nt, Artificial Sequence
  Description of Artificial Sequence:  Enzymatic Nucleic Acid
  misc_feature (1)..(4): Phosphorothioate 3'-Internucleotide Linkage
  misc_feature (1)..(7): 2'-O-Methyl
  misc_feature (9)..(15): 2'-O-Methyl
  misc_feature (19)..(19): 2'-O-Methyl
  misc_feature (21)..(23): 2'-O-Methyl
  misc_feature (26)..(26): 2'-O-Methyl
  misc_feature (28)..(35): 2'-O-Methyl
  misc_feature (17)..(17): 2'-deoxy-2'-amino
  misc_feature (27)..(27): 2'-deoxy-2'-amino
  misc_feature (36)..(36): n stands for inverted deoxyabasic derivative
ucuucuggccgaaaggcgagugaggucugacgcggn

SEQ ID NO: 6426 - RNA, 36 nt, Artificial Sequence
  Description of Artificial Sequence:  Enzymatic Nucleic Acid
  misc_feature (1)..(4): Phosphorothioate 3'-Internucleotide Linkage
  misc_feature (1)..(7): 2'-O-Methyl
  misc_feature (9)..(15): 2'-O-Methyl
  misc_feature (19)..(19): 2'-O-Methyl
  misc_feature (21)..(23): 2'-O-Methyl
  misc_feature (26)..(26): 2'-O-Methyl
  misc_feature (28)..(35): 2'-O-Methyl
  misc_feature (17)..(17): 2'-deoxy-2'-amino
  misc_feature (27)..(27): 2'-deoxy-2'-amino
  misc_feature (36)..(36): n stands for inverted deoxyabasic derivative
ggagccagccgaaaggcgagugaggucucagcaggn

SEQ ID NO: 6427 - RNA, 34 nt, Artificial Sequence
  Description of Artificial Sequence:  Enzymatic Nucleic Acid
  misc_feature (1)..(4): Phosphorothioate 3'-Internucleotide Linkage
  misc_feature (1)..(6): 2'-O-Methyl
  misc_feature (8)..(14): 2'-O-Methyl
  misc_feature (18)..(18): 2'-O-Methyl
  misc_feature (20)..(22): 2'-O-Methyl
  misc_feature (25)..(25): 2'-O-Methyl
  misc_feature (27)..(33): 2'-O-Methyl
  misc_feature (16)..(16): 2'-deoxy-2'-amino
  misc_feature (26)..(26): 2'-deoxy-2'-amino
  misc_feature (34)..(34): n stands for inverted deoxyabasic derivative
cacgaggccgaaaggcgagugaggucuaggggun

SEQ ID NO: 6428 - RNA, 34 nt, Artificial Sequence
  Description of Artificial Sequence:  Enzymatic Nucleic Acid
  misc_feature (1)..(4): Phosphorothioate 3'-Internucleotide Linkage
  misc_feature (1)..(6): 2'-O-Methyl
  misc_feature (8)..(14): 2'-O-Methyl
  misc_feature (18)..(18): 2'-O-Methyl
  misc_feature (20)..(22): 2'-O-Methyl
  misc_feature (25)..(25): 2'-O-Methyl
  misc_feature (27)..(33): 2'-O-Methyl
  misc_feature (16)..(16): 2'-deoxy-2'-amino
  misc_feature (26)..(26): 2'-deoxy-2'-amino
  misc_feature (34)..(34): n stands for inverted deoxyabasic derivative
cuguaagccgaaaggcgagugaggucuacgagcn

SEQ ID NO: 6429 - RNA, 36 nt, Artificial Sequence
  Description of Artificial Sequence:  Enzymatic Nucleic Acid
  misc_feature (1)..(4): Phosphorothioate 3'-Internucleotide Linkage
  misc_feature (1)..(7): 2'-O-Methyl
  misc_feature (9)..(15): 2'-O-Methyl
  misc_feature (19)..(19): 2'-O-Methyl
  misc_feature (21)..(23): 2'-O-Methyl
  misc_feature (26)..(26): 2'-O-Methyl
  misc_feature (28)..(35): 2'-O-Methyl
  misc_feature (17)..(17): 2'-deoxy-2'-amino
  misc_feature (27)..(27): 2'-deoxy-2'-amino
  misc_feature (36)..(36): n stands for inverted deoxyabasic derivative
uccaccagccgaaaggcgagugaggucugagucuan

SEQ ID NO: 6430 - RNA, 36 nt, Artificial Sequence
  Description of Artificial Sequence:  Enzymatic Nucleic Acid
  misc_feature (1)..(4): Phosphorothioate 3'-Internucleotide Linkage
  misc_feature (1)..(7): 2'-O-Methyl
  misc_feature (9)..(15): 2'-O-Methyl
  misc_feature (19)..(19): 2'-O-Methyl
  misc_feature (21)..(23): 2'-O-Methyl
  misc_feature (26)..(26): 2'-O-Methyl
  misc_feature (28)..(35): 2'-O-Methyl
  misc_feature (17)..(17): 2'-deoxy-2'-amino
  misc_feature (27)..(27): 2'-deoxy-2'-amino
  misc_feature (36)..(36): n stands for inverted deoxyabasic derivative
aaguccagccgaaaggcgagugaggucucacgagun

SEQ ID NO: 6431 - RNA, 34 nt, Artificial Sequence
  Description of Artificial Sequence:  Enzymatic Nucleic Acid
  misc_feature (1)..(4): Phosphorothioate 3'-Internucleotide Linkage
  misc_feature (1)..(6): 2'-O-Methyl
  misc_feature (8)..(14): 2'-O-Methyl
  misc_feature (18)..(18): 2'-O-Methyl
  misc_feature (20)..(22): 2'-O-Methyl
  misc_feature (25)..(25): 2'-O-Methyl
  misc_feature (27)..(33): 2'-O-Methyl
  misc_feature (16)..(16): 2'-deoxy-2'-amino
  misc_feature (26)..(26): 2'-deoxy-2'-amino
  misc_feature (34)..(34): n stands for inverted deoxyabasic derivative
ggacuggccgaaaggcgagugaggucugaauuun

SEQ ID NO: 6432 - RNA, 34 nt, Artificial Sequence
  Description of Artificial Sequence:  Enzymatic Nucleic Acid
  misc_feature (1)..(4): Phosphorothioate 3'-Internucleotide Linkage
  misc_feature (1)..(6): 2'-O-Methyl
  misc_feature (8)..(14): 2'-O-Methyl
  misc_feature (18)..(18): 2'-O-Methyl
  misc_feature (20)..(22): 2'-O-Methyl
  misc_feature (25)..(25): 2'-O-Methyl
  misc_feature (27)..(33): 2'-O-Methyl
  misc_feature (16)..(16): 2'-deoxy-2'-amino
  misc_feature (26)..(26): 2'-deoxy-2'-amino
  misc_feature (34)..(34): n stands for inverted deoxyabasic derivative
cagacagccgaaaggcgagugaggucuauccagn

SEQ ID NO: 6433 - RNA, 36 nt, Artificial Sequence
  Description of Artificial Sequence:  Enzymatic Nucleic Acid
  misc_feature (1)..(4): Phosphorothioate 3'-Internucleotide Linkage
  misc_feature (1)..(7): 2'-O-Methyl
  misc_feature (9)..(15): 2'-O-Methyl
  misc_feature (19)..(19): 2'-O-Methyl
  misc_feature (21)..(23): 2'-O-Methyl
  misc_feature (26)..(26): 2'-O-Methyl
  misc_feature (28)..(35): 2'-O-Methyl
  misc_feature (17)..(17): 2'-deoxy-2'-amino
  misc_feature (27)..(27): 2'-deoxy-2'-amino
  misc_feature (36)..(36): n stands for inverted deoxyabasic derivative
aacgccggccgaaaggcgagugaggucuagacacan

SEQ ID NO: 6434 - RNA, 34 nt, Artificial Sequence
  Description of Artificial Sequence:  Enzymatic Nucleic Acid
  misc_feature (1)..(4): Phosphorothioate 3'-Internucleotide Linkage
  misc_feature (1)..(6): 2'-O-Methyl
  misc_feature (8)..(14): 2'-O-Methyl
  misc_feature (18)..(18): 2'-O-Methyl
  misc_feature (20)..(22): 2'-O-Methyl
  misc_feature (25)..(25): 2'-O-Methyl
  misc_feature (27)..(33): 2'-O-Methyl
  misc_feature (16)..(16): 2'-deoxy-2'-amino
  misc_feature (26)..(26): 2'-deoxy-2'-amino
  misc_feature (34)..(34): n stands for inverted deoxyabasic derivative
aaaacggccgaaaggcgagugaggucucgcagan

SEQ ID NO: 6435 - RNA, 34 nt, Artificial Sequence
  Description of Artificial Sequence:  Enzymatic Nucleic Acid
  misc_feature (1)..(4): Phosphorothioate 3'-Internucleotide Linkage
  misc_feature (1)..(6): 2'-O-Methyl
  misc_feature (8)..(14): 2'-O-Methyl
  misc_feature (18)..(18): 2'-O-Methyl
  misc_feature (20)..(22): 2'-O-Methyl
  misc_feature (25)..(25): 2'-O-Methyl
  misc_feature (27)..(33): 2'-O-Methyl
  misc_feature (16)..(16): 2'-deoxy-2'-amino
  misc_feature (26)..(26): 2'-deoxy-2'-amino
  misc_feature (34)..(34): n stands for inverted deoxyabasic derivative
uagcaggccgaaaggcgagugaggucuaggaugn

SEQ ID NO: 6436 - RNA, 34 nt, Artificial Sequence
  Description of Artificial Sequence:  Enzymatic Nucleic Acid
  misc_feature (1)..(4): Phosphorothioate 3'-Internucleotide Linkage
  misc_feature (1)..(6): 2'-O-Methyl
  misc_feature (8)..(14): 2'-O-Methyl
  misc_feature (18)..(18): 2'-O-Methyl
  misc_feature (20)..(22): 2'-O-Methyl
  misc_feature (25)..(25): 2'-O-Methyl
  misc_feature (27)..(33): 2'-O-Methyl
  misc_feature (16)..(16): 2'-deoxy-2'-amino
  misc_feature (26)..(26): 2'-deoxy-2'-amino
  misc_feature (34)..(34): n stands for inverted deoxyabasic derivative
gcauaggccgaaaggcgagugaggucuagcaggn

SEQ ID NO: 6437 - RNA, 34 nt, Artificial Sequence
  Description of Artificial Sequence:  Enzymatic Nucleic Acid
  misc_feature (1)..(4): Phosphorothioate 3'-Internucleotide Linkage
  misc_feature (1)..(6): 2'-O-Methyl
  misc_feature (8)..(14): 2'-O-Methyl
  misc_feature (18)..(18): 2'-O-Methyl
  misc_feature (20)..(22): 2'-O-Methyl
  misc_feature (25)..(25): 2'-O-Methyl
  misc_feature (27)..(33): 2'-O-Methyl
  misc_feature (16)..(16): 2'-deoxy-2'-amino
  misc_feature (26)..(26): 2'-deoxy-2'-amino
  misc_feature (34)..(34): n stands for inverted deoxyabasic derivative
aacggggccgaaaggcgagugaggucuaacauan

SEQ ID NO: 6438 - RNA, 34 nt, Artificial Sequence
  Description of Artificial Sequence:  Enzymatic Nucleic Acid
  misc_feature (1)..(4): Phosphorothioate 3'-Internucleotide Linkage
  misc_feature (1)..(6): 2'-O-Methyl
  misc_feature (8)..(14): 2'-O-Methyl
  misc_feature (18)..(18): 2'-O-Methyl
  misc_feature (20)..(22): 2'-O-Methyl
  misc_feature (25)..(25): 2'-O-Methyl
  misc_feature (27)..(33): 2'-O-Methyl
  misc_feature (16)..(16): 2'-deoxy-2'-amino
  misc_feature (26)..(26): 2'-deoxy-2'-amino
  misc_feature (34)..(34): n stands for inverted deoxyabasic derivative
agaggagccgaaaggcgagugaggucuaaacggn

SEQ ID NO: 6439 - RNA, 34 nt, Artificial Sequence
  Description of Artificial Sequence:  Enzymatic Nucleic Acid
  misc_feature (1)..(4): Phosphorothioate 3'-Internucleotide Linkage
  misc_feature (1)..(6): 2'-O-Methyl
  misc_feature (8)..(14): 2'-O-Methyl
  misc_feature (18)..(18): 2'-O-Methyl
  misc_feature (20)..(22): 2'-O-Methyl
  misc_feature (25)..(25): 2'-O-Methyl
  misc_feature (27)..(33): 2'-O-Methyl
  misc_feature (16)..(16): 2'-deoxy-2'-amino
  misc_feature (26)..(26): 2'-deoxy-2'-amino
  misc_feature (34)..(34): n stands for inverted deoxyabasic derivative
aguaaagccgaaaggcgagugaggucuugagccn

SEQ ID NO: 6440 - RNA, 36 nt, Artificial Sequence
  Description of Artificial Sequence:  Enzymatic Nucleic Acid
  misc_feature (1)..(4): Phosphorothioate 3'-Internucleotide Linkage
  misc_feature (1)..(7): 2'-O-Methyl
  misc_feature (9)..(15): 2'-O-Methyl
  misc_feature (19)..(19): 2'-O-Methyl
  misc_feature (21)..(23): 2'-O-Methyl
  misc_feature (26)..(26): 2'-O-Methyl
  misc_feature (28)..(35): 2'-O-Methyl
  misc_feature (17)..(17): 2'-deoxy-2'-amino
  misc_feature (27)..(27): 2'-deoxy-2'-amino
  misc_feature (36)..(36): n stands for inverted deoxyabasic derivative
uaguaaagccgaaaggcgagugaggucuugagccan

SEQ ID NO: 6441 - RNA, 34 nt, Artificial Sequence
  Description of Artificial Sequence:  Enzymatic Nucleic Acid
  misc_feature (1)..(4): Phosphorothioate 3'-Internucleotide Linkage
  misc_feature (1)..(6): 2'-O-Methyl
  misc_feature (8)..(14): 2'-O-Methyl
  misc_feature (18)..(18): 2'-O-Methyl
  misc_feature (20)..(22): 2'-O-Methyl
  misc_feature (25)..(25): 2'-O-Methyl
  misc_feature (27)..(33): 2'-O-Methyl
  misc_feature (16)..(16): 2'-deoxy-2'-amino
  misc_feature (26)..(26): 2'-deoxy-2'-amino
  misc_feature (34)..(34): n stands for inverted deoxyabasic derivative
auggcagccgaaaggcgagugaggucuuaguaan

SEQ ID NO: 6442 - RNA, 36 nt, Artificial Sequence
  Description of Artificial Sequence:  Enzymatic Nucleic Acid
  misc_feature (1)..(4): Phosphorothioate 3'-Internucleotide Linkage
  misc_feature (1)..(7): 2'-O-Methyl
  misc_feature (9)..(15): 2'-O-Methyl
  misc_feature (19)..(19): 2'-O-Methyl
  misc_feature (21)..(23): 2'-O-Methyl
  misc_feature (26)..(26): 2'-O-Methyl
  misc_feature (28)..(35): 2'-O-Methyl
  misc_feature (17)..(17): 2'-deoxy-2'-amino
  misc_feature (27)..(27): 2'-deoxy-2'-amino
  misc_feature (36)..(36): n stands for inverted deoxyabasic derivative
aauggcagccgaaaggcgagugaggucuuaguaaan

SEQ ID NO: 6443 - RNA, 36 nt, Artificial Sequence
  Description of Artificial Sequence:  Enzymatic Nucleic Acid
  misc_feature (1)..(4): Phosphorothioate 3'-Internucleotide Linkage
  misc_feature (1)..(7): 2'-O-Methyl
  misc_feature (9)..(15): 2'-O-Methyl
  misc_feature (19)..(19): 2'-O-Methyl
  misc_feature (21)..(23): 2'-O-Methyl
  misc_feature (26)..(26): 2'-O-Methyl
  misc_feature (28)..(35): 2'-O-Methyl
  misc_feature (17)..(17): 2'-deoxy-2'-amino
  misc_feature (27)..(27): 2'-deoxy-2'-amino
  misc_feature (36)..(36): n stands for inverted deoxyabasic derivative
caaaugggccgaaaggcgagugaggucuacuaguan

SEQ ID NO: 6444 - RNA, 34 nt, Artificial Sequence
  Description of Artificial Sequence:  Enzymatic Nucleic Acid
  misc_feature (1)..(4): Phosphorothioate 3'-Internucleotide Linkage
  misc_feature (1)..(6): 2'-O-Methyl
  misc_feature (8)..(14): 2'-O-Methyl
  misc_feature (18)..(18): 2'-O-Methyl
  misc_feature (20)..(22): 2'-O-Methyl
  misc_feature (25)..(25): 2'-O-Methyl
  misc_feature (27)..(33): 2'-O-Methyl
  misc_feature (16)..(16): 2'-deoxy-2'-amino
  misc_feature (26)..(26): 2'-deoxy-2'-amino
  misc_feature (34)..(34): n stands for inverted deoxyabasic derivative
gaaccagccgaaaggcgagugaggucuugaacan

SEQ ID NO: 6445 - RNA, 34 nt, Artificial Sequence
  Description of Artificial Sequence:  Enzymatic Nucleic Acid
  misc_feature (1)..(4): Phosphorothioate 3'-Internucleotide Linkage
  misc_feature (1)..(6): 2'-O-Methyl
  misc_feature (8)..(14): 2'-O-Methyl
  misc_feature (18)..(18): 2'-O-Methyl
  misc_feature (20)..(22): 2'-O-Methyl
  misc_feature (25)..(25): 2'-O-Methyl
  misc_feature (27)..(33): 2'-O-Methyl
  misc_feature (16)..(16): 2'-deoxy-2'-amino
  misc_feature (26)..(26): 2'-deoxy-2'-amino
  misc_feature (34)..(34): n stands for inverted deoxyabasic derivative
uacgaagccgaaaggcgagugaggucucacugan

SEQ ID NO: 6446 - RNA, 36 nt, Artificial Sequence
  Description of Artificial Sequence:  Enzymatic Nucleic Acid
  misc_feature (1)..(4): Phosphorothioate 3'-Internucleotide Linkage
  misc_feature (1)..(7): 2'-O-Methyl
  misc_feature (9)..(15): 2'-O-Methyl
  misc_feature (19)..(19): 2'-O-Methyl
  misc_feature (21)..(23): 2'-O-Methyl
  misc_feature (26)..(26): 2'-O-Methyl
  misc_feature (28)..(35): 2'-O-Methyl
  misc_feature (17)..(17): 2'-deoxy-2'-amino
  misc_feature (27)..(27): 2'-deoxy-2'-amino
  misc_feature (36)..(36): n stands for inverted deoxyabasic derivative
cuacgaagccgaaaggcgagugaggucucacugaan

SEQ ID NO: 6447 - RNA, 34 nt, Artificial Sequence
  Description of Artificial Sequence:  Enzymatic Nucleic Acid
  misc_feature (1)..(4): Phosphorothioate 3'-Internucleotide Linkage
  misc_feature (1)..(6): 2'-O-Methyl
  misc_feature (8)..(14): 2'-O-Methyl
  misc_feature (18)..(18): 2'-O-Methyl
  misc_feature (20)..(22): 2'-O-Methyl
  misc_feature (25)..(25): 2'-O-Methyl
  misc_feature (27)..(33): 2'-O-Methyl
  misc_feature (16)..(16): 2'-deoxy-2'-amino
  misc_feature (26)..(26): 2'-deoxy-2'-amino
  misc_feature (34)..(34): n stands for inverted deoxyabasic derivative
ggaaaggccgaaaggcgagugaggucuccuacgn

SEQ ID NO: 6448 - RNA, 34 nt, Artificial Sequence
  Description of Artificial Sequence:  Enzymatic Nucleic Acid
  misc_feature (1)..(4): Phosphorothioate 3'-Internucleotide Linkage
  misc_feature (1)..(6): 2'-O-Methyl
  misc_feature (8)..(14): 2'-O-Methyl
  misc_feature (18)..(18): 2'-O-Methyl
  misc_feature (20)..(22): 2'-O-Methyl
  misc_feature (25)..(25): 2'-O-Methyl
  misc_feature (27)..(33): 2'-O-Methyl
  misc_feature (16)..(16): 2'-deoxy-2'-amino
  misc_feature (26)..(26): 2'-deoxy-2'-amino
  misc_feature (34)..(34): n stands for inverted deoxyabasic derivative
aaaagagccgaaaggcgagugaggucuccacaan

SEQ ID NO: 6449 - RNA, 34 nt, Artificial Sequence
  Description of Artificial Sequence:  Enzymatic Nucleic Acid
  misc_feature (1)..(4): Phosphorothioate 3'-Internucleotide Linkage
  misc_feature (1)..(6): 2'-O-Methyl
  misc_feature (8)..(14): 2'-O-Methyl
  misc_feature (18)..(18): 2'-O-Methyl
  misc_feature (20)..(22): 2'-O-Methyl
  misc_feature (25)..(25): 2'-O-Methyl
  misc_feature (27)..(33): 2'-O-Methyl
  misc_feature (16)..(16): 2'-deoxy-2'-amino
  misc_feature (26)..(26): 2'-deoxy-2'-amino
  misc_feature (34)..(34): n stands for inverted deoxyabasic derivative
aguugggccgaaaggcgagugaggucugagaaan

SEQ ID NO: 6450 - RNA, 36 nt, Artificial Sequence
  Description of Artificial Sequence:  Enzymatic Nucleic Acid
  misc_feature (1)..(4): Phosphorothioate 3'-Internucleotide Linkage
  misc_feature (1)..(7): 2'-O-Methyl
  misc_feature (9)..(15): 2'-O-Methyl
  misc_feature (19)..(19): 2'-O-Methyl
  misc_feature (21)..(23): 2'-O-Methyl
  misc_feature (26)..(26): 2'-O-Methyl
  misc_feature (28)..(35): 2'-O-Methyl
  misc_feature (17)..(17): 2'-deoxy-2'-amino
  misc_feature (27)..(27): 2'-deoxy-2'-amino
  misc_feature (36)..(36): n stands for inverted deoxyabasic derivative
aaguugggccgaaaggcgagugaggucugagaaagn

SEQ ID NO: 6451 - RNA, 36 nt, Artificial Sequence
  Description of Artificial Sequence:  Enzymatic Nucleic Acid
  misc_feature (1)..(4): Phosphorothioate 3'-Internucleotide Linkage
  misc_feature (1)..(7): 2'-O-Methyl
  misc_feature (9)..(15): 2'-O-Methyl
  misc_feature (19)..(19): 2'-O-Methyl
  misc_feature (21)..(23): 2'-O-Methyl
  misc_feature (26)..(26): 2'-O-Methyl
  misc_feature (28)..(35): 2'-O-Methyl
  misc_feature (17)..(17): 2'-deoxy-2'-amino
  misc_feature (27)..(27): 2'-deoxy-2'-amino
  misc_feature (36)..(36): n stands for inverted deoxyabasic derivative
cagcaaagccgaaaggcgagugaggucuacuuggcn

SEQ ID NO: 6452 - RNA, 34 nt, Artificial Sequence
  Description of Artificial Sequence:  Enzymatic Nucleic Acid
  misc_feature (1)..(4): Phosphorothioate 3'-Internucleotide Linkage
  misc_feature (1)..(6): 2'-O-Methyl
  misc_feature (8)..(14): 2'-O-Methyl
  misc_feature (18)..(18): 2'-O-Methyl
  misc_feature (20)..(22): 2'-O-Methyl
  misc_feature (25)..(25): 2'-O-Methyl
  misc_feature (27)..(33): 2'-O-Methyl
  misc_feature (16)..(16): 2'-deoxy-2'-amino
  misc_feature (26)..(26): 2'-deoxy-2'-amino
  misc_feature (34)..(34): n stands for inverted deoxyabasic derivative
ucagcggccgaaaggcgagugaggucucgacggn

SEQ ID NO: 6453 - RNA, 34 nt, Artificial Sequence
  Description of Artificial Sequence:  Enzymatic Nucleic Acid
  misc_feature (1)..(4): Phosphorothioate 3'-Internucleotide Linkage
  misc_feature (1)..(6): 2'-O-Methyl
  misc_feature (8)..(14): 2'-O-Methyl
  misc_feature (18)..(18): 2'-O-Methyl
  misc_feature (20)..(22): 2'-O-Methyl
  misc_feature (25)..(25): 2'-O-Methyl
  misc_feature (27)..(33): 2'-O-Methyl
  misc_feature (16)..(16): 2'-deoxy-2'-amino
  misc_feature (26)..(26): 2'-deoxy-2'-amino
  misc_feature (34)..(34): n stands for inverted deoxyabasic derivative
auucaggccgaaaggcgagugaggucugccgacn

SEQ ID NO: 6454 - RNA, 36 nt, Artificial Sequence
  Description of Artificial Sequence:  Enzymatic Nucleic Acid
  misc_feature (1)..(4): Phosphorothioate 3'-Internucleotide Linkage
  misc_feature (1)..(7): 2'-O-Methyl
  misc_feature (9)..(15): 2'-O-Methyl
  misc_feature (19)..(19): 2'-O-Methyl
  misc_feature (21)..(23): 2'-O-Methyl
  misc_feature (26)..(26): 2'-O-Methyl
  misc_feature (28)..(35): 2'-O-Methyl
  misc_feature (17)..(17): 2'-deoxy-2'-amino
  misc_feature (27)..(27): 2'-deoxy-2'-amino
  misc_feature (36)..(36): n stands for inverted deoxyabasic derivative
gauucaggccgaaaggcgagugaggucugccgacgn

SEQ ID NO: 6455 - RNA, 34 nt, Artificial Sequence
  Description of Artificial Sequence:  Enzymatic Nucleic Acid
  misc_feature (1)..(4): Phosphorothioate 3'-Internucleotide Linkage
  misc_feature (1)..(6): 2'-O-Methyl
  misc_feature (8)..(14): 2'-O-Methyl
  misc_feature (18)..(18): 2'-O-Methyl
  misc_feature (20)..(22): 2'-O-Methyl
  misc_feature (25)..(25): 2'-O-Methyl
  misc_feature (27)..(33): 2'-O-Methyl
  misc_feature (16)..(16): 2'-deoxy-2'-amino
  misc_feature (26)..(26): 2'-deoxy-2'-amino
  misc_feature (34)..(34): n stands for inverted deoxyabasic derivative
cacagagccgaaaggcgagugaggucuggggagn

SEQ ID NO: 6456 - RNA, 34 nt, Artificial Sequence
  Description of Artificial Sequence:  Enzymatic Nucleic Acid
  misc_feature (1)..(4): Phosphorothioate 3'-Internucleotide Linkage
  misc_feature (1)..(6): 2'-O-Methyl
  misc_feature (8)..(14): 2'-O-Methyl
  misc_feature (18)..(18): 2'-O-Methyl
  misc_feature (20)..(22): 2'-O-Methyl
  misc_feature (25)..(25): 2'-O-Methyl
  misc_feature (27)..(33): 2'-O-Methyl
  misc_feature (16)..(16): 2'-deoxy-2'-amino
  misc_feature (26)..(26): 2'-deoxy-2'-amino
  misc_feature (34)..(34): n stands for inverted deoxyabasic derivative
aaggcagccgaaaggcgagugaggucuagacggn

SEQ ID NO: 6457 - RNA, 34 nt, Artificial Sequence
  Description of Artificial Sequence:  Enzymatic Nucleic Acid
  misc_feature (1)..(4): Phosphorothioate 3'-Internucleotide Linkage
  misc_feature (1)..(6): 2'-O-Methyl
  misc_feature (8)..(14): 2'-O-Methyl
  misc_feature (18)..(18): 2'-O-Methyl
  misc_feature (20)..(22): 2'-O-Methyl
  misc_feature (25)..(25): 2'-O-Methyl
  misc_feature (27)..(33): 2'-O-Methyl
  misc_feature (16)..(16): 2'-deoxy-2'-amino
  misc_feature (26)..(26): 2'-deoxy-2'-amino
  misc_feature (34)..(34): n stands for inverted deoxyabasic derivative
agaagggccgaaaggcgagugaggucuacagacn

SEQ ID NO: 6458 - RNA, 34 nt, Artificial Sequence
  Description of Artificial Sequence:  Enzymatic Nucleic Acid
  misc_feature (1)..(4): Phosphorothioate 3'-Internucleotide Linkage
  misc_feature (1)..(6): 2'-O-Methyl
  misc_feature (8)..(14): 2'-O-Methyl
  misc_feature (18)..(18): 2'-O-Methyl
  misc_feature (20)..(22): 2'-O-Methyl
  misc_feature (25)..(25): 2'-O-Methyl
  misc_feature (27)..(33): 2'-O-Methyl
  misc_feature (16)..(16): 2'-deoxy-2'-amino
  misc_feature (26)..(26): 2'-deoxy-2'-amino
  misc_feature (34)..(34): n stands for inverted deoxyabasic derivative
gaaguggccgaaaggcgagugaggucuacacggn

SEQ ID NO: 6459 - RNA, 34 nt, Artificial Sequence
  Description of Artificial Sequence:  Enzymatic Nucleic Acid
  misc_feature (1)..(4): Phosphorothioate 3'-Internucleotide Linkage
  misc_feature (1)..(6): 2'-O-Methyl
  misc_feature (8)..(14): 2'-O-Methyl
  misc_feature (18)..(18): 2'-O-Methyl
  misc_feature (20)..(22): 2'-O-Methyl
  misc_feature (25)..(25): 2'-O-Methyl
  misc_feature (27)..(33): 2'-O-Methyl
  misc_feature (16)..(16): 2'-deoxy-2'-amino
  misc_feature (26)..(26): 2'-deoxy-2'-amino
  misc_feature (34)..(34): n stands for inverted deoxyabasic derivative
gugaaggccgaaaggcgagugaggucugaagugn

SEQ ID NO: 6460 - RNA, 34 nt, Artificial Sequence
  Description of Artificial Sequence:  Enzymatic Nucleic Acid
  misc_feature (1)..(4): Phosphorothioate 3'-Internucleotide Linkage
  misc_feature (1)..(6): 2'-O-Methyl
  misc_feature (8)..(14): 2'-O-Methyl
  misc_feature (18)..(18): 2'-O-Methyl
  misc_feature (20)..(22): 2'-O-Methyl
  misc_feature (25)..(25): 2'-O-Methyl
  misc_feature (27)..(33): 2'-O-Methyl
  misc_feature (16)..(16): 2'-deoxy-2'-amino
  misc_feature (26)..(26): 2'-deoxy-2'-amino
  misc_feature (34)..(34): n stands for inverted deoxyabasic derivative
cguucagccgaaaggcgagugaggucugguggun

SEQ ID NO: 6461 - RNA, 36 nt, Artificial Sequence
  Description of Artificial Sequence:  Enzymatic Nucleic Acid
  misc_feature (1)..(4): Phosphorothioate 3'-Internucleotide Linkage
  misc_feature (1)..(7): 2'-O-Methyl
  misc_feature (9)..(15): 2'-O-Methyl
  misc_feature (19)..(19): 2'-O-Methyl
  misc_feature (21)..(23): 2'-O-Methyl
  misc_feature (26)..(26): 2'-O-Methyl
  misc_feature (28)..(35): 2'-O-Methyl
  misc_feature (17)..(17): 2'-deoxy-2'-amino
  misc_feature (27)..(27): 2'-deoxy-2'-amino
  misc_feature (36)..(36): n stands for inverted deoxyabasic derivative
uuggagggccgaaaggcgagugaggucuuugaacan

SEQ ID NO: 6462 - RNA, 36 nt, Artificial Sequence
  Description of Artificial Sequence:  Enzymatic Nucleic Acid
  misc_feature (1)..(4): Phosphorothioate 3'-Internucleotide Linkage
  misc_feature (1)..(7): 2'-O-Methyl
  misc_feature (9)..(15): 2'-O-Methyl
  misc_feature (19)..(19): 2'-O-Methyl
  misc_feature (21)..(23): 2'-O-Methyl
  misc_feature (26)..(26): 2'-O-Methyl
  misc_feature (28)..(35): 2'-O-Methyl
  misc_feature (17)..(17): 2'-deoxy-2'-amino
  misc_feature (27)..(27): 2'-deoxy-2'-amino
  misc_feature (36)..(36): n stands for inverted deoxyabasic derivative
caaggcagccgaaaggcgagugaggucuagcuuggn

SEQ ID NO: 6463 - RNA, 34 nt, Artificial Sequence
  Description of Artificial Sequence:  Enzymatic Nucleic Acid
  misc_feature (1)..(4): Phosphorothioate 3'-Internucleotide Linkage
  misc_feature (1)..(6): 2'-O-Methyl
  misc_feature (8)..(14): 2'-O-Methyl
  misc_feature (18)..(18): 2'-O-Methyl
  misc_feature (20)..(22): 2'-O-Methyl
  misc_feature (25)..(25): 2'-O-Methyl
  misc_feature (27)..(33): 2'-O-Methyl
  misc_feature (16)..(16): 2'-deoxy-2'-amino
  misc_feature (26)..(26): 2'-deoxy-2'-amino
  misc_feature (34)..(34): n stands for inverted deoxyabasic derivative
ccaagggccgaaaggcgagugaggucuacagcun

SEQ ID NO: 6464 - RNA, 36 nt, Artificial Sequence
  Description of Artificial Sequence:  Enzymatic Nucleic Acid
  misc_feature (1)..(4): Phosphorothioate 3'-Internucleotide Linkage
  misc_feature (1)..(7): 2'-O-Methyl
  misc_feature (9)..(15): 2'-O-Methyl
  misc_feature (19)..(19): 2'-O-Methyl
  misc_feature (21)..(23): 2'-O-Methyl
  misc_feature (26)..(26): 2'-O-Methyl
  misc_feature (28)..(35): 2'-O-Methyl
  misc_feature (17)..(17): 2'-deoxy-2'-amino
  misc_feature (27)..(27): 2'-deoxy-2'-amino
  misc_feature (36)..(36): n stands for inverted deoxyabasic derivative
cccaagggccgaaaggcgagugaggucuacagcuun

SEQ ID NO: 6465 - RNA, 34 nt, Artificial Sequence
  Description of Artificial Sequence:  Enzymatic Nucleic Acid
  misc_feature (1)..(4): Phosphorothioate 3'-Internucleotide Linkage
  misc_feature (1)..(6): 2'-O-Methyl
  misc_feature (8)..(14): 2'-O-Methyl
  misc_feature (18)..(18): 2'-O-Methyl
  misc_feature (20)..(22): 2'-O-Methyl
  misc_feature (25)..(25): 2'-O-Methyl
  misc_feature (27)..(33): 2'-O-Methyl
  misc_feature (16)..(16): 2'-deoxy-2'-amino
  misc_feature (26)..(26): 2'-deoxy-2'-amino
  misc_feature (34)..(34): n stands for inverted deoxyabasic derivative
uagggggccgaaaggcgagugaggucuauuuggn

SEQ ID NO: 6466 - RNA, 34 nt, Artificial Sequence
  Description of Artificial Sequence:  Enzymatic Nucleic Acid
  misc_feature (1)..(4): Phosphorothioate 3'-Internucleotide Linkage
  misc_feature (1)..(6): 2'-O-Methyl
  misc_feature (8)..(14): 2'-O-Methyl
  misc_feature (18)..(18): 2'-O-Methyl
  misc_feature (20)..(22): 2'-O-Methyl
  misc_feature (25)..(25): 2'-O-Methyl
  misc_feature (27)..(33): 2'-O-Methyl
  misc_feature (16)..(16): 2'-deoxy-2'-amino
  misc_feature (26)..(26): 2'-deoxy-2'-amino
  misc_feature (34)..(34): n stands for inverted deoxyabasic derivative
gucuaagccgaaaggcgagugaggucuaacagun

SEQ ID NO: 6467 - RNA, 34 nt, Artificial Sequence
  Description of Artificial Sequence:  Enzymatic Nucleic Acid
  misc_feature (1)..(4): Phosphorothioate 3'-Internucleotide Linkage
  misc_feature (1)..(6): 2'-O-Methyl
  misc_feature (8)..(14): 2'-O-Methyl
  misc_feature (18)..(18): 2'-O-Methyl
  misc_feature (20)..(22): 2'-O-Methyl
  misc_feature (25)..(25): 2'-O-Methyl
  misc_feature (27)..(33): 2'-O-Methyl
  misc_feature (16)..(16): 2'-deoxy-2'-amino
  misc_feature (26)..(26): 2'-deoxy-2'-amino
  misc_feature (34)..(34): n stands for inverted deoxyabasic derivative
aggggagccgaaaggcgagugaggucucugccun

SEQ ID NO: 6468 - RNA, 36 nt, Artificial Sequence
  Description of Artificial Sequence:  Enzymatic Nucleic Acid
  misc_feature (1)..(4): Phosphorothioate 3'-Internucleotide Linkage
  misc_feature (1)..(7): 2'-O-Methyl
  misc_feature (9)..(15): 2'-O-Methyl
  misc_feature (19)..(19): 2'-O-Methyl
  misc_feature (21)..(23): 2'-O-Methyl
  misc_feature (26)..(26): 2'-O-Methyl
  misc_feature (28)..(35): 2'-O-Methyl
  misc_feature (17)..(17): 2'-deoxy-2'-amino
  misc_feature (27)..(27): 2'-deoxy-2'-amino
  misc_feature (36)..(36): n stands for inverted deoxyabasic derivative
uaggggagccgaaaggcgagugaggucucugccucn

SEQ ID NO: 6469 - RNA, 34 nt, Artificial Sequence
  Description of Artificial Sequence:  Enzymatic Nucleic Acid
  misc_feature (1)..(4): Phosphorothioate 3'-Internucleotide Linkage
  misc_feature (1)..(6): 2'-O-Methyl
  misc_feature (8)..(14): 2'-O-Methyl
  misc_feature (18)..(18): 2'-O-Methyl
  misc_feature (20)..(22): 2'-O-Methyl
  misc_feature (25)..(25): 2'-O-Methyl
  misc_feature (27)..(33): 2'-O-Methyl
  misc_feature (16)..(16): 2'-deoxy-2'-amino
  misc_feature (26)..(26): 2'-deoxy-2'-amino
  misc_feature (34)..(34): n stands for inverted deoxyabasic derivative
gcgagggccgaaaggcgagugaggucugagggan

SEQ ID NO: 6470 - RNA, 34 nt, Artificial Sequence
  Description of Artificial Sequence:  Enzymatic Nucleic Acid
  misc_feature (1)..(4): Phosphorothioate 3'-Internucleotide Linkage
  misc_feature (1)..(6): 2'-O-Methyl
  misc_feature (8)..(14): 2'-O-Methyl
  misc_feature (18)..(18): 2'-O-Methyl
  misc_feature (20)..(22): 2'-O-Methyl
  misc_feature (25)..(25): 2'-O-Methyl
  misc_feature (27)..(33): 2'-O-Methyl
  misc_feature (16)..(16): 2'-deoxy-2'-amino
  misc_feature (26)..(26): 2'-deoxy-2'-amino
  misc_feature (34)..(34): n stands for inverted deoxyabasic derivative
cgucuggccgaaaggcgagugaggucugaggcgn

SEQ ID NO: 6471 - RNA, 34 nt, Artificial Sequence
  Description of Artificial Sequence:  Enzymatic Nucleic Acid
  misc_feature (1)..(4): Phosphorothioate 3'-Internucleotide Linkage
  misc_feature (1)..(6): 2'-O-Methyl
  misc_feature (8)..(14): 2'-O-Methyl
  misc_feature (18)..(18): 2'-O-Methyl
  misc_feature (20)..(22): 2'-O-Methyl
  misc_feature (25)..(25): 2'-O-Methyl
  misc_feature (27)..(33): 2'-O-Methyl
  misc_feature (16)..(16): 2'-deoxy-2'-amino
  misc_feature (26)..(26): 2'-deoxy-2'-amino
  misc_feature (34)..(34): n stands for inverted deoxyabasic derivative
cugcgagccgaaaggcgagugaggucugcggcgn

SEQ ID NO: 6472 - RNA, 34 nt, Artificial Sequence
  Description of Artificial Sequence:  Enzymatic Nucleic Acid
  misc_feature (1)..(4): Phosphorothioate 3'-Internucleotide Linkage
  misc_feature (1)..(6): 2'-O-Methyl
  misc_feature (8)..(14): 2'-O-Methyl
  misc_feature (18)..(18): 2'-O-Methyl
  misc_feature (20)..(22): 2'-O-Methyl
  misc_feature (25)..(25): 2'-O-Methyl
  misc_feature (27)..(33): 2'-O-Methyl
  misc_feature (16)..(16): 2'-deoxy-2'-amino
  misc_feature (26)..(26): 2'-deoxy-2'-amino
  misc_feature (34)..(34): n stands for inverted deoxyabasic derivative
cuucuggccgaaaggcgagugaggucugacgcgn

SEQ ID NO: 6473 - RNA, 34 nt, Artificial Sequence
  Description of Artificial Sequence:  Enzymatic Nucleic Acid
  misc_feature (1)..(4): Phosphorothioate 3'-Internucleotide Linkage
  misc_feature (1)..(6): 2'-O-Methyl
  misc_feature (8)..(14): 2'-O-Methyl
  misc_feature (18)..(18): 2'-O-Methyl
  misc_feature (20)..(22): 2'-O-Methyl
  misc_feature (25)..(25): 2'-O-Methyl
  misc_feature (27)..(33): 2'-O-Methyl
  misc_feature (16)..(16): 2'-deoxy-2'-amino
  misc_feature (26)..(26): 2'-deoxy-2'-amino
  misc_feature (34)..(34): n stands for inverted deoxyabasic derivative
uucccagccgaaaggcgagugaggucucuuaugn

SEQ ID NO: 6474 - RNA, 38 nt, Artificial Sequence
  Description of Artificial Sequence:  Enzymatic Nucleic Acid
  misc_feature (1)..(4): Phosphorothioate 3'-Internucleotide Linkage
  misc_feature (1)..(10): 2'-O-Methyl
  misc_feature (12)..(13): 2'-O-Methyl
  misc_feature (19)..(23): 2'-O-Methyl
  misc_feature (25)..(26): 2'-O-Methyl
  misc_feature (31)..(37): 2'-O-Methyl
  misc_feature (11)..(11): n stands for hexaethylene glycol spacer
  misc_feature (24)..(24): n stands for hexaethylene glycol spacer
  misc_feature (14)..(18): 2'-deoxy-2'-amino
  misc_feature (27)..(27): 2'-deoxy-2'-amino
  misc_feature (38)..(38): n stands for inverted deoxyabasic derivative
gcagacagganucccuucaagganuccgggauccagcn

SEQ ID NO: 6475 - RNA, 38 nt, Artificial Sequence
  Description of Artificial Sequence:  Enzymatic Nucleic Acid
  misc_feature (1)..(4): Phosphorothioate 3'-Internucleotide Linkage
  misc_feature (1)..(10): 2'-O-Methyl
  misc_feature (12)..(13): 2'-O-Methyl
  misc_feature (19)..(23): 2'-O-Methyl
  misc_feature (25)..(26): 2'-O-Methyl
  misc_feature (31)..(37): 2'-O-Methyl
  misc_feature (11)..(11): n stands for hexaethylene glycol spacer
  misc_feature (24)..(24): n stands for hexaethylene glycol spacer
  misc_feature (14)..(18): 2'-deoxy-2'-amino
  misc_feature (27)..(27): 2'-deoxy-2'-amino
  misc_feature (38)..(38): n stands for inverted deoxyabasic derivative
aggcccagganucccuucaagganuccgggucccauan

SEQ ID NO: 6476 - RNA, 38 nt, Artificial Sequence
  Description of Artificial Sequence:  Enzymatic Nucleic Acid
  misc_feature (1)..(4): Phosphorothioate 3'-Internucleotide Linkage
  misc_feature (1)..(10): 2'-O-Methyl
  misc_feature (12)..(13): 2'-O-Methyl
  misc_feature (19)..(23): 2'-O-Methyl
  misc_feature (25)..(26): 2'-O-Methyl
  misc_feature (31)..(37): 2'-O-Methyl
  misc_feature (11)..(11): n stands for hexaethylene glycol spacer
  misc_feature (24)..(24): n stands for hexaethylene glycol spacer
  misc_feature (14)..(18): 2'-deoxy-2'-amino
  misc_feature (27)..(27): 2'-deoxy-2'-amino
  misc_feature (38)..(38): n stands for inverted deoxyabasic derivative
ccuguaagganucccuucaagganuccgggacgagcan

SEQ ID NO: 6477 - RNA, 38 nt, Artificial Sequence
  Description of Artificial Sequence:  Enzymatic Nucleic Acid
  misc_feature (1)..(4): Phosphorothioate 3'-Internucleotide Linkage
  misc_feature (1)..(10): 2'-O-Methyl
  misc_feature (12)..(13): 2'-O-Methyl
  misc_feature (19)..(23): 2'-O-Methyl
  misc_feature (25)..(26): 2'-O-Methyl
  misc_feature (31)..(37): 2'-O-Methyl
  misc_feature (11)..(11): n stands for hexaethylene glycol spacer
  misc_feature (24)..(24): n stands for hexaethylene glycol spacer
  misc_feature (14)..(18): 2'-deoxy-2'-amino
  misc_feature (27)..(27): 2'-deoxy-2'-amino
  misc_feature (38)..(38): n stands for inverted deoxyabasic derivative
acacaucgganucccuucaagganuccgggagcgauan

SEQ ID NO: 6478 - RNA, 38 nt, Artificial Sequence
  Description of Artificial Sequence:  Enzymatic Nucleic Acid
  misc_feature (1)..(4): Phosphorothioate 3'-Internucleotide Linkage
  misc_feature (1)..(10): 2'-O-Methyl
  misc_feature (12)..(13): 2'-O-Methyl
  misc_feature (19)..(23): 2'-O-Methyl
  misc_feature (25)..(26): 2'-O-Methyl
  misc_feature (31)..(37): 2'-O-Methyl
  misc_feature (11)..(11): n stands for hexaethylene glycol spacer
  misc_feature (24)..(24): n stands for hexaethylene glycol spacer
  misc_feature (14)..(18): 2'-deoxy-2'-amino
  misc_feature (27)..(27): 2'-deoxy-2'-amino
  misc_feature (38)..(38): n stands for inverted deoxyabasic derivative
gacacaugganucccuucaagganuccgggcagcgaun

SEQ ID NO: 6479 - RNA, 38 nt, Artificial Sequence
  Description of Artificial Sequence:  Enzymatic Nucleic Acid
  misc_feature (1)..(4): Phosphorothioate 3'-Internucleotide Linkage
  misc_feature (1)..(10): 2'-O-Methyl
  misc_feature (12)..(13): 2'-O-Methyl
  misc_feature (19)..(23): 2'-O-Methyl
  misc_feature (25)..(26): 2'-O-Methyl
  misc_feature (31)..(37): 2'-O-Methyl
  misc_feature (11)..(11): n stands for hexaethylene glycol spacer
  misc_feature (24)..(24): n stands for hexaethylene glycol spacer
  misc_feature (14)..(18): 2'-deoxy-2'-amino
  misc_feature (27)..(27): 2'-deoxy-2'-amino
  misc_feature (38)..(38): n stands for inverted deoxyabasic derivative
ccgcagagganucccuucaagganuccgggacauccan

SEQ ID NO: 6480 - RNA, 36 nt, Artificial Sequence
  Description of Artificial Sequence:  Enzymatic Nucleic Acid
  misc_feature (1)..(4): Phosphorothioate 3'-Internucleotide Linkage
  misc_feature (1)..(9): 2'-O-Methyl
  misc_feature (11)..(12): 2'-O-Methyl
  misc_feature (18)..(22): 2'-O-Methyl
  misc_feature (24)..(25): 2'-O-Methyl
  misc_feature (30)..(35): 2'-O-Methyl
  misc_feature (10)..(10): n stands for hexaethylene glycol spacer
  misc_feature (23)..(23): n stands for hexaethylene glycol spacer
  misc_feature (13)..(17): 2'-deoxy-2'-amino
  misc_feature (26)..(26): 2'-deoxy-2'-amino
  misc_feature (36)..(36): n stands for inverted deoxyabasic derivative
cgcagagganucccuucaagganuccgggacauccn

SEQ ID NO: 6481 - RNA, 36 nt, Artificial Sequence
  Description of Artificial Sequence:  Enzymatic Nucleic Acid
  misc_feature (1)..(4): Phosphorothioate 3'-Internucleotide Linkage
  misc_feature (1)..(9): 2'-O-Methyl
  misc_feature (11)..(12): 2'-O-Methyl
  misc_feature (18)..(22): 2'-O-Methyl
  misc_feature (24)..(25): 2'-O-Methyl
  misc_feature (30)..(35): 2'-O-Methyl
  misc_feature (10)..(10): n stands for hexaethylene glycol spacer
  misc_feature (23)..(23): n stands for hexaethylene glycol spacer
  misc_feature (13)..(17): 2'-deoxy-2'-amino
  misc_feature (26)..(26): 2'-deoxy-2'-amino
  misc_feature (36)..(36): n stands for inverted deoxyabasic derivative
ggcccagganucccuucaagganuccgggucccaun

SEQ ID NO: 6482 - RNA, 38 nt, Artificial Sequence
  Description of Artificial Sequence:  Enzymatic Nucleic Acid
  misc_feature (1)..(4): Phosphorothioate 3'-Internucleotide Linkage
  misc_feature (1)..(10): 2'-O-Methyl
  misc_feature (12)..(13): 2'-O-Methyl
  misc_feature (19)..(23): 2'-O-Methyl
  misc_feature (25)..(26): 2'-O-Methyl
  misc_feature (31)..(37): 2'-O-Methyl
  misc_feature (11)..(11): n stands for hexaethylene glycol spacer
  misc_feature (24)..(24): n stands for hexaethylene glycol spacer
  misc_feature (14)..(18): 2'-deoxy-2'-amino
  misc_feature (27)..(27): 2'-deoxy-2'-amino
  misc_feature (38)..(38): n stands for inverted deoxyabasic derivative
ugaggccgganucccuucaagganuccgggacucccan

SEQ ID NO: 6483 - RNA, 36 nt, Artificial Sequence
  Description of Artificial Sequence:  Enzymatic Nucleic Acid
  misc_feature (1)..(4): Phosphorothioate 3'-Internucleotide Linkage
  misc_feature (1)..(9): 2'-O-Methyl
  misc_feature (11)..(12): 2'-O-Methyl
  misc_feature (18)..(22): 2'-O-Methyl
  misc_feature (24)..(25): 2'-O-Methyl
  misc_feature (30)..(35): 2'-O-Methyl
  misc_feature (10)..(10): n stands for hexaethylene glycol spacer
  misc_feature (23)..(23): n stands for hexaethylene glycol spacer
  misc_feature (13)..(17): 2'-deoxy-2'-amino
  misc_feature (26)..(26): 2'-deoxy-2'-amino
  misc_feature (36)..(36): n stands for inverted deoxyabasic derivative
gaggccgganucccuucaagganuccgggacucccn

SEQ ID NO: 6484 - RNA, 38 nt, Artificial Sequence
  Description of Artificial Sequence:  Enzymatic Nucleic Acid
  misc_feature (1)..(4): Phosphorothioate 3'-Internucleotide Linkage
  misc_feature (1)..(10): 2'-O-Methyl
  misc_feature (12)..(13): 2'-O-Methyl
  misc_feature (19)..(23): 2'-O-Methyl
  misc_feature (25)..(26): 2'-O-Methyl
  misc_feature (31)..(37): 2'-O-Methyl
  misc_feature (11)..(11): n stands for hexaethylene glycol spacer
  misc_feature (24)..(24): n stands for hexaethylene glycol spacer
  misc_feature (14)..(18): 2'-deoxy-2'-amino
  misc_feature (27)..(27): 2'-deoxy-2'-amino
  misc_feature (38)..(38): n stands for inverted deoxyabasic derivative
cacugaagganucccuucaagganuccgggaaauggcn

SEQ ID NO: 6485 - RNA, 38 nt, Artificial Sequence
  Description of Artificial Sequence:  Enzymatic Nucleic Acid
  misc_feature (1)..(4): Phosphorothioate 3'-Internucleotide Linkage
  misc_feature (1)..(10): 2'-O-Methyl
  misc_feature (12)..(13): 2'-O-Methyl
  misc_feature (19)..(23): 2'-O-Methyl
  misc_feature (25)..(26): 2'-O-Methyl
  misc_feature (31)..(37): 2'-O-Methyl
  misc_feature (11)..(11): n stands for hexaethylene glycol spacer
  misc_feature (24)..(24): n stands for hexaethylene glycol spacer
  misc_feature (14)..(18): 2'-deoxy-2'-amino
  misc_feature (27)..(27): 2'-deoxy-2'-amino
  misc_feature (38)..(38): n stands for inverted deoxyabasic derivative
cgaaccagganucccuucaagganuccgggugaacaan

SEQ ID NO: 6486 - RNA, 38 nt, Artificial Sequence
  Description of Artificial Sequence:  Enzymatic Nucleic Acid
  misc_feature (1)..(4): Phosphorothioate 3'-Internucleotide Linkage
  misc_feature (1)..(10): 2'-O-Methyl
  misc_feature (12)..(13): 2'-O-Methyl
  misc_feature (19)..(23): 2'-O-Methyl
  misc_feature (25)..(26): 2'-O-Methyl
  misc_feature (31)..(37): 2'-O-Methyl
  misc_feature (11)..(11): n stands for hexaethylene glycol spacer
  misc_feature (24)..(24): n stands for hexaethylene glycol spacer
  misc_feature (14)..(18): 2'-deoxy-2'-amino
  misc_feature (27)..(27): 2'-deoxy-2'-amino
  misc_feature (38)..(38): n stands for inverted deoxyabasic derivative
uacgaacgganucccuucaagganuccgggacugaacn

SEQ ID NO: 6487 - RNA, 38 nt, Artificial Sequence
  Description of Artificial Sequence:  Enzymatic Nucleic Acid
  misc_feature (1)..(4): Phosphorothioate 3'-Internucleotide Linkage
  misc_feature (1)..(10): 2'-O-Methyl
  misc_feature (12)..(13): 2'-O-Methyl
  misc_feature (19)..(23): 2'-O-Methyl
  misc_feature (25)..(26): 2'-O-Methyl
  misc_feature (31)..(37): 2'-O-Methyl
  misc_feature (11)..(11): n stands for hexaethylene glycol spacer
  misc_feature (24)..(24): n stands for hexaethylene glycol spacer
  misc_feature (14)..(18): 2'-deoxy-2'-amino
  misc_feature (27)..(27): 2'-deoxy-2'-amino
  misc_feature (38)..(38): n stands for inverted deoxyabasic derivative
ggaaagcgganucccuucaagganuccgggcuacgaan

SEQ ID NO: 6488 - RNA, 36 nt, Artificial Sequence
  Description of Artificial Sequence:  Enzymatic Nucleic Acid
  misc_feature (1)..(4): Phosphorothioate 3'-Internucleotide Linkage
  misc_feature (1)..(9): 2'-O-Methyl
  misc_feature (11)..(12): 2'-O-Methyl
  misc_feature (18)..(22): 2'-O-Methyl
  misc_feature (24)..(25): 2'-O-Methyl
  misc_feature (30)..(35): 2'-O-Methyl
  misc_feature (10)..(10): n stands for hexaethylene glycol spacer
  misc_feature (23)..(23): n stands for hexaethylene glycol spacer
  misc_feature (13)..(17): 2'-deoxy-2'-amino
  misc_feature (26)..(26): 2'-deoxy-2'-amino
  misc_feature (36)..(36): n stands for inverted deoxyabasic derivative
gugcgcgganucccuucaagganuccgggccguggn

SEQ ID NO: 6489 - RNA, 36 nt, Artificial Sequence
  Description of Artificial Sequence:  Enzymatic Nucleic Acid
  misc_feature (1)..(4): Phosphorothioate 3'-Internucleotide Linkage
  misc_feature (1)..(9): 2'-O-Methyl
  misc_feature (11)..(12): 2'-O-Methyl
  misc_feature (18)..(22): 2'-O-Methyl
  misc_feature (24)..(25): 2'-O-Methyl
  misc_feature (30)..(35): 2'-O-Methyl
  misc_feature (10)..(10): n stands for hexaethylene glycol spacer
  misc_feature (23)..(23): n stands for hexaethylene glycol spacer
  misc_feature (13)..(17): 2'-deoxy-2'-amino
  misc_feature (26)..(26): 2'-deoxy-2'-amino
  misc_feature (36)..(36): n stands for inverted deoxyabasic derivative
ggcguugganucccuucaagganuccgggacggugn

SEQ ID NO: 6490 - RNA, 36 nt, Artificial Sequence
  Description of Artificial Sequence:  Enzymatic Nucleic Acid
  misc_feature (1)..(4): Phosphorothioate 3'-Internucleotide Linkage
  misc_feature (1)..(9): 2'-O-Methyl
  misc_feature (11)..(12): 2'-O-Methyl
  misc_feature (18)..(22): 2'-O-Methyl
  misc_feature (24)..(25): 2'-O-Methyl
  misc_feature (30)..(35): 2'-O-Methyl
  misc_feature (10)..(10): n stands for hexaethylene glycol spacer
  misc_feature (23)..(23): n stands for hexaethylene glycol spacer
  misc_feature (13)..(17): 2'-deoxy-2'-amino
  misc_feature (26)..(26): 2'-deoxy-2'-amino
  misc_feature (36)..(36): n stands for inverted deoxyabasic derivative
gcuugcgganucccuucaagganuccgggugagugn

SEQ ID NO: 6491 - RNA, 38 nt, Artificial Sequence
  Description of Artificial Sequence:  Enzymatic Nucleic Acid
  misc_feature (1)..(4): Phosphorothioate 3'-Internucleotide Linkage
  misc_feature (1)..(10): 2'-O-Methyl
  misc_feature (12)..(13): 2'-O-Methyl
  misc_feature (19)..(23): 2'-O-Methyl
  misc_feature (25)..(26): 2'-O-Methyl
  misc_feature (31)..(37): 2'-O-Methyl
  misc_feature (11)..(11): n stands for hexaethylene glycol spacer
  misc_feature (24)..(24): n stands for hexaethylene glycol spacer
  misc_feature (14)..(18): 2'-deoxy-2'-amino
  misc_feature (27)..(27): 2'-deoxy-2'-amino
  misc_feature (38)..(38): n stands for inverted deoxyabasic derivative
aguucuugganucccuucaagganuccggguucuaggn

SEQ ID NO: 6492 - RNA, 38 nt, Artificial Sequence
  Description of Artificial Sequence:  Enzymatic Nucleic Acid
  misc_feature (1)..(4): Phosphorothioate 3'-Internucleotide Linkage
  misc_feature (1)..(10): 2'-O-Methyl
  misc_feature (12)..(13): 2'-O-Methyl
  misc_feature (19)..(23): 2'-O-Methyl
  misc_feature (25)..(26): 2'-O-Methyl
  misc_feature (31)..(37): 2'-O-Methyl
  misc_feature (11)..(11): n stands for hexaethylene glycol spacer
  misc_feature (24)..(24): n stands for hexaethylene glycol spacer
  misc_feature (14)..(18): 2'-deoxy-2'-amino
  misc_feature (27)..(27): 2'-deoxy-2'-amino
  misc_feature (38)..(38): n stands for inverted deoxyabasic derivative
aguuuccgganucccuucaagganuccgggaccuuaun

SEQ ID NO: 6493 - RNA, 38 nt, Artificial Sequence
  Description of Artificial Sequence:  Enzymatic Nucleic Acid
  misc_feature (1)..(4): Phosphorothioate 3'-Internucleotide Linkage
  misc_feature (1)..(10): 2'-O-Methyl
  misc_feature (12)..(13): 2'-O-Methyl
  misc_feature (19)..(23): 2'-O-Methyl
  misc_feature (25)..(26): 2'-O-Methyl
  misc_feature (31)..(37): 2'-O-Methyl
  misc_feature (11)..(11): n stands for hexaethylene glycol spacer
  misc_feature (24)..(24): n stands for hexaethylene glycol spacer
  misc_feature (14)..(18): 2'-deoxy-2'-amino
  misc_feature (27)..(27): 2'-deoxy-2'-amino
  misc_feature (38)..(38): n stands for inverted deoxyabasic derivative
ggagccagganucccuucaagganuccgggcagcaggn

SEQ ID NO: 6494 - RNA, 36 nt, Artificial Sequence
  Description of Artificial Sequence:  Enzymatic Nucleic Acid
  misc_feature (1)..(4): Phosphorothioate 3'-Internucleotide Linkage
  misc_feature (1)..(9): 2'-O-Methyl
  misc_feature (11)..(12): 2'-O-Methyl
  misc_feature (18)..(22): 2'-O-Methyl
  misc_feature (24)..(25): 2'-O-Methyl
  misc_feature (30)..(35): 2'-O-Methyl
  misc_feature (10)..(10): n stands for hexaethylene glycol spacer
  misc_feature (23)..(23): n stands for hexaethylene glycol spacer
  misc_feature (13)..(17): 2'-deoxy-2'-amino
  misc_feature (26)..(26): 2'-deoxy-2'-amino
  misc_feature (36)..(36): n stands for inverted deoxyabasic derivative
uggagcgganucccuucaagganuccgggaccagcn

SEQ ID NO: 6495 - RNA, 36 nt, Artificial Sequence
  Description of Artificial Sequence:  Enzymatic Nucleic Acid
  misc_feature (1)..(4): Phosphorothioate 3'-Internucleotide Linkage
  misc_feature (1)..(9): 2'-O-Methyl
  misc_feature (11)..(12): 2'-O-Methyl
  misc_feature (18)..(22): 2'-O-Methyl
  misc_feature (24)..(25): 2'-O-Methyl
  misc_feature (30)..(35): 2'-O-Methyl
  misc_feature (10)..(10): n stands for hexaethylene glycol spacer
  misc_feature (23)..(23): n stands for hexaethylene glycol spacer
  misc_feature (13)..(17): 2'-deoxy-2'-amino
  misc_feature (26)..(26): 2'-deoxy-2'-amino
  misc_feature (36)..(36): n stands for inverted deoxyabasic derivative
cuguaagganucccuucaagganuccgggacgagcn

SEQ ID NO: 6496 - RNA, 38 nt, Artificial Sequence
  Description of Artificial Sequence:  Enzymatic Nucleic Acid
  misc_feature (1)..(4): Phosphorothioate 3'-Internucleotide Linkage
  misc_feature (1)..(10): 2'-O-Methyl
  misc_feature (12)..(13): 2'-O-Methyl
  misc_feature (19)..(23): 2'-O-Methyl
  misc_feature (25)..(26): 2'-O-Methyl
  misc_feature (31)..(37): 2'-O-Methyl
  misc_feature (11)..(11): n stands for hexaethylene glycol spacer
  misc_feature (24)..(24): n stands for hexaethylene glycol spacer
  misc_feature (14)..(18): 2'-deoxy-2'-amino
  misc_feature (27)..(27): 2'-deoxy-2'-amino
  misc_feature (38)..(38): n stands for inverted deoxyabasic derivative
aguccacgganucccuucaagganuccgggacgagucn

SEQ ID NO: 6497 - RNA, 38 nt, Artificial Sequence
  Description of Artificial Sequence:  Enzymatic Nucleic Acid
  misc_feature (1)..(4): Phosphorothioate 3'-Internucleotide Linkage
  misc_feature (1)..(10): 2'-O-Methyl
  misc_feature (12)..(13): 2'-O-Methyl
  misc_feature (19)..(23): 2'-O-Methyl
  misc_feature (25)..(26): 2'-O-Methyl
  misc_feature (31)..(37): 2'-O-Methyl
  misc_feature (11)..(11): n stands for hexaethylene glycol spacer
  misc_feature (24)..(24): n stands for hexaethylene glycol spacer
  misc_feature (14)..(18): 2'-deoxy-2'-amino
  misc_feature (27)..(27): 2'-deoxy-2'-amino
  misc_feature (38)..(38): n stands for inverted deoxyabasic derivative
agaagucgganucccuucaagganuccgggaccacgan

SEQ ID NO: 6498 - RNA, 36 nt, Artificial Sequence
  Description of Artificial Sequence:  Enzymatic Nucleic Acid
  misc_feature (1)..(4): Phosphorothioate 3'-Internucleotide Linkage
  misc_feature (1)..(9): 2'-O-Methyl
  misc_feature (11)..(12): 2'-O-Methyl
  misc_feature (18)..(22): 2'-O-Methyl
  misc_feature (24)..(25): 2'-O-Methyl
  misc_feature (30)..(35): 2'-O-Methyl
  misc_feature (10)..(10): n stands for hexaethylene glycol spacer
  misc_feature (23)..(23): n stands for hexaethylene glycol spacer
  misc_feature (13)..(17): 2'-deoxy-2'-amino
  misc_feature (26)..(26): 2'-deoxy-2'-amino
  misc_feature (36)..(36): n stands for inverted deoxyabasic derivative
cacaucgganucccuucaagganuccgggagcgaun

SEQ ID NO: 6499 - RNA, 36 nt, Artificial Sequence
  Description of Artificial Sequence:  Enzymatic Nucleic Acid
  misc_feature (1)..(4): Phosphorothioate 3'-Internucleotide Linkage
  misc_feature (1)..(9): 2'-O-Methyl
  misc_feature (11)..(12): 2'-O-Methyl
  misc_feature (18)..(22): 2'-O-Methyl
  misc_feature (24)..(25): 2'-O-Methyl
  misc_feature (30)..(35): 2'-O-Methyl
  misc_feature (10)..(10): n stands for hexaethylene glycol spacer
  misc_feature (23)..(23): n stands for hexaethylene glycol spacer
  misc_feature (13)..(17): 2'-deoxy-2'-amino
  misc_feature (26)..(26): 2'-deoxy-2'-amino
  misc_feature (36)..(36): n stands for inverted deoxyabasic derivative
acacaugganucccuucaagganuccgggcagcgan

SEQ ID NO: 6500 - RNA, 36 nt, Artificial Sequence
  Description of Artificial Sequence:  Enzymatic Nucleic Acid
  misc_feature (1)..(4): Phosphorothioate 3'-Internucleotide Linkage
  misc_feature (1)..(9): 2'-O-Methyl
  misc_feature (11)..(12): 2'-O-Methyl
  misc_feature (18)..(22): 2'-O-Methyl
  misc_feature (24)..(25): 2'-O-Methyl
  misc_feature (30)..(35): 2'-O-Methyl
  misc_feature (10)..(10): n stands for hexaethylene glycol spacer
  misc_feature (23)..(23): n stands for hexaethylene glycol spacer
  misc_feature (13)..(17): 2'-deoxy-2'-amino
  misc_feature (26)..(26): 2'-deoxy-2'-amino
  misc_feature (36)..(36): n stands for inverted deoxyabasic derivative
agaggagganucccuucaagganuccgggaaacggn

SEQ ID NO: 6501 - RNA, 38 nt, Artificial Sequence
  Description of Artificial Sequence:  Enzymatic Nucleic Acid
  misc_feature (1)..(4): Phosphorothioate 3'-Internucleotide Linkage
  misc_feature (1)..(10): 2'-O-Methyl
  misc_feature (12)..(13): 2'-O-Methyl
  misc_feature (19)..(23): 2'-O-Methyl
  misc_feature (25)..(26): 2'-O-Methyl
  misc_feature (31)..(37): 2'-O-Methyl
  misc_feature (11)..(11): n stands for hexaethylene glycol spacer
  misc_feature (24)..(24): n stands for hexaethylene glycol spacer
  misc_feature (14)..(18): 2'-deoxy-2'-amino
  misc_feature (27)..(27): 2'-deoxy-2'-amino
  misc_feature (38)..(38): n stands for inverted deoxyabasic derivative
cugaggcgganucccuucaagganuccgggcacucccn

SEQ ID NO: 6502 - RNA, 38 nt, Artificial Sequence
  Description of Artificial Sequence:  Enzymatic Nucleic Acid
  misc_feature (1)..(4): Phosphorothioate 3'-Internucleotide Linkage
  misc_feature (1)..(10): 2'-O-Methyl
  misc_feature (12)..(13): 2'-O-Methyl
  misc_feature (19)..(23): 2'-O-Methyl
  misc_feature (25)..(26): 2'-O-Methyl
  misc_feature (31)..(37): 2'-O-Methyl
  misc_feature (11)..(11): n stands for hexaethylene glycol spacer
  misc_feature (24)..(24): n stands for hexaethylene glycol spacer
  misc_feature (14)..(18): 2'-deoxy-2'-amino
  misc_feature (27)..(27): 2'-deoxy-2'-amino
  misc_feature (38)..(38): n stands for inverted deoxyabasic derivative
uaguaaagganucccuucaagganuccgggugagccan

SEQ ID NO: 6503 - RNA, 38 nt, Artificial Sequence
  Description of Artificial Sequence:  Enzymatic Nucleic Acid
  misc_feature (1)..(4): Phosphorothioate 3'-Internucleotide Linkage
  misc_feature (1)..(10): 2'-O-Methyl
  misc_feature (12)..(13): 2'-O-Methyl
  misc_feature (19)..(23): 2'-O-Methyl
  misc_feature (25)..(26): 2'-O-Methyl
  misc_feature (31)..(37): 2'-O-Methyl
  misc_feature (11)..(11): n stands for hexaethylene glycol spacer
  misc_feature (24)..(24): n stands for hexaethylene glycol spacer
  misc_feature (14)..(18): 2'-deoxy-2'-amino
  misc_feature (27)..(27): 2'-deoxy-2'-amino
  misc_feature (38)..(38): n stands for inverted deoxyabasic derivative
aauggcagganucccuucaagganuccggguaguaaan

SEQ ID NO: 6504 - RNA, 38 nt, Artificial Sequence
  Description of Artificial Sequence:  Enzymatic Nucleic Acid
  misc_feature (1)..(4): Phosphorothioate 3'-Internucleotide Linkage
  misc_feature (1)..(10): 2'-O-Methyl
  misc_feature (12)..(13): 2'-O-Methyl
  misc_feature (19)..(23): 2'-O-Methyl
  misc_feature (25)..(26): 2'-O-Methyl
  misc_feature (31)..(37): 2'-O-Methyl
  misc_feature (11)..(11): n stands for hexaethylene glycol spacer
  misc_feature (24)..(24): n stands for hexaethylene glycol spacer
  misc_feature (14)..(18): 2'-deoxy-2'-amino
  misc_feature (27)..(27): 2'-deoxy-2'-amino
  misc_feature (38)..(38): n stands for inverted deoxyabasic derivative
cuacgaagganucccuucaagganuccgggcacugaan

SEQ ID NO: 6505 - RNA, 38 nt, Artificial Sequence
  Description of Artificial Sequence:  Enzymatic Nucleic Acid
  misc_feature (1)..(4): Phosphorothioate 3'-Internucleotide Linkage
  misc_feature (1)..(10): 2'-O-Methyl
  misc_feature (12)..(13): 2'-O-Methyl
  misc_feature (19)..(23): 2'-O-Methyl
  misc_feature (25)..(26): 2'-O-Methyl
  misc_feature (31)..(37): 2'-O-Methyl
  misc_feature (11)..(11): n stands for hexaethylene glycol spacer
  misc_feature (24)..(24): n stands for hexaethylene glycol spacer
  misc_feature (14)..(18): 2'-deoxy-2'-amino
  misc_feature (27)..(27): 2'-deoxy-2'-amino
  misc_feature (38)..(38): n stands for inverted deoxyabasic derivative
gaaagccgganucccuucaagganuccggguacgaacn

SEQ ID NO: 6506 - RNA, 36 nt, Artificial Sequence
  Description of Artificial Sequence:  Enzymatic Nucleic Acid
  misc_feature (1)..(4): Phosphorothioate 3'-Internucleotide Linkage
  misc_feature (1)..(9): 2'-O-Methyl
  misc_feature (11)..(12): 2'-O-Methyl
  misc_feature (18)..(22): 2'-O-Methyl
  misc_feature (24)..(25): 2'-O-Methyl
  misc_feature (30)..(35): 2'-O-Methyl
  misc_feature (10)..(10): n stands for hexaethylene glycol spacer
  misc_feature (23)..(23): n stands for hexaethylene glycol spacer
  misc_feature (13)..(17): 2'-deoxy-2'-amino
  misc_feature (26)..(26): 2'-deoxy-2'-amino
  misc_feature (36)..(36): n stands for inverted deoxyabasic derivative
gaaagcgganucccuucaagganuccgggcuacgan

SEQ ID NO: 6507 - RNA, 38 nt, Artificial Sequence
  Description of Artificial Sequence:  Enzymatic Nucleic Acid
  misc_feature (1)..(4): Phosphorothioate 3'-Internucleotide Linkage
  misc_feature (1)..(10): 2'-O-Methyl
  misc_feature (12)..(13): 2'-O-Methyl
  misc_feature (19)..(23): 2'-O-Methyl
  misc_feature (25)..(26): 2'-O-Methyl
  misc_feature (31)..(37): 2'-O-Methyl
  misc_feature (11)..(11): n stands for hexaethylene glycol spacer
  misc_feature (24)..(24): n stands for hexaethylene glycol spacer
  misc_feature (14)..(18): 2'-deoxy-2'-amino
  misc_feature (27)..(27): 2'-deoxy-2'-amino
  misc_feature (38)..(38): n stands for inverted deoxyabasic derivative
accacaugganucccuucaagganuccgggauccauan

SEQ ID NO: 6508 - RNA, 36 nt, Artificial Sequence
  Description of Artificial Sequence:  Enzymatic Nucleic Acid
  misc_feature (1)..(4): Phosphorothioate 3'-Internucleotide Linkage
  misc_feature (1)..(9): 2'-O-Methyl
  misc_feature (11)..(12): 2'-O-Methyl
  misc_feature (18)..(22): 2'-O-Methyl
  misc_feature (24)..(25): 2'-O-Methyl
  misc_feature (30)..(35): 2'-O-Methyl
  misc_feature (10)..(10): n stands for hexaethylene glycol spacer
  misc_feature (23)..(23): n stands for hexaethylene glycol spacer
  misc_feature (13)..(17): 2'-deoxy-2'-amino
  misc_feature (26)..(26): 2'-deoxy-2'-amino
  misc_feature (36)..(36): n stands for inverted deoxyabasic derivative
aaggcagganucccuucaagganuccgggagacggn

SEQ ID NO: 6509 - RNA, 38 nt, Artificial Sequence
  Description of Artificial Sequence:  Enzymatic Nucleic Acid
  misc_feature (1)..(4): Phosphorothioate 3'-Internucleotide Linkage
  misc_feature (1)..(10): 2'-O-Methyl
  misc_feature (12)..(13): 2'-O-Methyl
  misc_feature (19)..(23): 2'-O-Methyl
  misc_feature (25)..(26): 2'-O-Methyl
  misc_feature (31)..(37): 2'-O-Methyl
  misc_feature (11)..(11): n stands for hexaethylene glycol spacer
  misc_feature (24)..(24): n stands for hexaethylene glycol spacer
  misc_feature (14)..(18): 2'-deoxy-2'-amino
  misc_feature (27)..(27): 2'-deoxy-2'-amino
  misc_feature (38)..(38): n stands for inverted deoxyabasic derivative
caaggcagganucccuucaagganuccgggagcuuggn

SEQ ID NO: 6510 - RNA, 36 nt, Artificial Sequence
  Description of Artificial Sequence:  Enzymatic Nucleic Acid
  misc_feature (1)..(4): Phosphorothioate 3'-Internucleotide Linkage
  misc_feature (1)..(9): 2'-O-Methyl
  misc_feature (11)..(12): 2'-O-Methyl
  misc_feature (18)..(22): 2'-O-Methyl
  misc_feature (24)..(25): 2'-O-Methyl
  misc_feature (30)..(35): 2'-O-Methyl
  misc_feature (10)..(10): n stands for hexaethylene glycol spacer
  misc_feature (23)..(23): n stands for hexaethylene glycol spacer
  misc_feature (13)..(17): 2'-deoxy-2'-amino
  misc_feature (26)..(26): 2'-deoxy-2'-amino
  misc_feature (36)..(36): n stands for inverted deoxyabasic derivative
gucuaagganucccuucaagganuccgggaacagun

SEQ ID NO: 6511 - RNA, 36 nt, Artificial Sequence
  Description of Artificial Sequence:  Enzymatic Nucleic Acid
  misc_feature (1)..(4): Phosphorothioate 3'-Internucleotide Linkage
  misc_feature (1)..(9): 2'-O-Methyl
  misc_feature (11)..(12): 2'-O-Methyl
  misc_feature (18)..(22): 2'-O-Methyl
  misc_feature (24)..(25): 2'-O-Methyl
  misc_feature (30)..(35): 2'-O-Methyl
  misc_feature (10)..(10): n stands for hexaethylene glycol spacer
  misc_feature (23)..(23): n stands for hexaethylene glycol spacer
  misc_feature (13)..(17): 2'-deoxy-2'-amino
  misc_feature (26)..(26): 2'-deoxy-2'-amino
  misc_feature (36)..(36): n stands for inverted deoxyabasic derivative
guucuugganucccuucaagganuccggguucuagn

SEQ ID NO: 6512 - RNA, 36 nt, Artificial Sequence
  Description of Artificial Sequence:  Enzymatic Nucleic Acid
  misc_feature (1)..(4): Phosphorothioate 3'-Internucleotide Linkage
  misc_feature (1)..(9): 2'-O-Methyl
  misc_feature (11)..(12): 2'-O-Methyl
  misc_feature (18)..(22): 2'-O-Methyl
  misc_feature (24)..(25): 2'-O-Methyl
  misc_feature (30)..(35): 2'-O-Methyl
  misc_feature (10)..(10): n stands for hexaethylene glycol spacer
  misc_feature (23)..(23): n stands for hexaethylene glycol spacer
  misc_feature (13)..(17): 2'-deoxy-2'-amino
  misc_feature (26)..(26): 2'-deoxy-2'-amino
  misc_feature (36)..(36): n stands for inverted deoxyabasic derivative
ggaguugganucccuucaagganuccggguucuucn

SEQ ID NO: 6513 - RNA, 38 nt, Artificial Sequence
  Description of Artificial Sequence:  Enzymatic Nucleic Acid
  misc_feature (1)..(4): Phosphorothioate 3'-Internucleotide Linkage
  misc_feature (1)..(10): 2'-O-Methyl
  misc_feature (12)..(13): 2'-O-Methyl
  misc_feature (19)..(23): 2'-O-Methyl
  misc_feature (25)..(26): 2'-O-Methyl
  misc_feature (31)..(37): 2'-O-Methyl
  misc_feature (11)..(11): n stands for hexaethylene glycol spacer
  misc_feature (24)..(24): n stands for hexaethylene glycol spacer
  misc_feature (14)..(18): 2'-deoxy-2'-amino
  misc_feature (27)..(27): 2'-deoxy-2'-amino
  misc_feature (38)..(38): n stands for inverted deoxyabasic derivative
agaucuugganucccuucaagganuccgggugcgacgn

SEQ ID NO: 6514 - RNA, 36 nt, Artificial Sequence
  Description of Artificial Sequence:  Enzymatic Nucleic Acid
  misc_feature (1)..(4): Phosphorothioate 3'-Internucleotide Linkage
  misc_feature (1)..(9): 2'-O-Methyl
  misc_feature (11)..(12): 2'-O-Methyl
  misc_feature (18)..(22): 2'-O-Methyl
  misc_feature (24)..(25): 2'-O-Methyl
  misc_feature (30)..(35): 2'-O-Methyl
  misc_feature (10)..(10): n stands for hexaethylene glycol spacer
  misc_feature (23)..(23): n stands for hexaethylene glycol spacer
  misc_feature (13)..(17): 2'-deoxy-2'-amino
  misc_feature (26)..(26): 2'-deoxy-2'-amino
  misc_feature (36)..(36): n stands for inverted deoxyabasic derivative
ugagaugganucccuucaagganuccggguucugcn

SEQ ID NO: 6515 - RNA, 38 nt, Artificial Sequence
  Description of Artificial Sequence:  Enzymatic Nucleic Acid
  misc_feature (1)..(4): Phosphorothioate 3'-Internucleotide Linkage
  misc_feature (1)..(10): 2'-O-Methyl
  misc_feature (12)..(13): 2'-O-Methyl
  misc_feature (19)..(23): 2'-O-Methyl
  misc_feature (25)..(26): 2'-O-Methyl
  misc_feature (31)..(37): 2'-O-Methyl
  misc_feature (11)..(11): n stands for hexaethylene glycol spacer
  misc_feature (24)..(24): n stands for hexaethylene glycol spacer
  misc_feature (14)..(18): 2'-deoxy-2'-amino
  misc_feature (27)..(27): 2'-deoxy-2'-amino
  misc_feature (38)..(38): n stands for inverted deoxyabasic derivative
uugagaugganucccuucaagganuccggguucugcgn

SEQ ID NO: 6516 - RNA, 36 nt, Artificial Sequence
  Description of Artificial Sequence:  Enzymatic Nucleic Acid
  misc_feature (1)..(4): Phosphorothioate 3'-Internucleotide Linkage
  misc_feature (1)..(9): 2'-O-Methyl
  misc_feature (11)..(12): 2'-O-Methyl
  misc_feature (18)..(22): 2'-O-Methyl
  misc_feature (24)..(25): 2'-O-Methyl
  misc_feature (30)..(35): 2'-O-Methyl
  misc_feature (10)..(10): n stands for hexaethylene glycol spacer
  misc_feature (23)..(23): n stands for hexaethylene glycol spacer
  misc_feature (13)..(17): 2'-deoxy-2'-amino
  misc_feature (26)..(26): 2'-deoxy-2'-amino
  misc_feature (36)..(36): n stands for inverted deoxyabasic derivative
guuuccgganucccuucaagganuccgggaccuuan

SEQ ID NO: 6517 - RNA, 38 nt, Artificial Sequence
  Description of Artificial Sequence:  Enzymatic Nucleic Acid
  misc_feature (1)..(4): Phosphorothioate 3'-Internucleotide Linkage
  misc_feature (1)..(10): 2'-O-Methyl
  misc_feature (12)..(13): 2'-O-Methyl
  misc_feature (19)..(23): 2'-O-Methyl
  misc_feature (25)..(26): 2'-O-Methyl
  misc_feature (31)..(37): 2'-O-Methyl
  misc_feature (11)..(11): n stands for hexaethylene glycol spacer
  misc_feature (24)..(24): n stands for hexaethylene glycol spacer
  misc_feature (14)..(18): 2'-deoxy-2'-amino
  misc_feature (27)..(27): 2'-deoxy-2'-amino
  misc_feature (38)..(38): n stands for inverted deoxyabasic derivative
aaguuucgganucccuucaagganuccgggcaccuuan

SEQ ID NO: 6518 - RNA, 36 nt, Artificial Sequence
  Description of Artificial Sequence:  Enzymatic Nucleic Acid
  misc_feature (1)..(4): Phosphorothioate 3'-Internucleotide Linkage
  misc_feature (1)..(9): 2'-O-Methyl
  misc_feature (11)..(12): 2'-O-Methyl
  misc_feature (18)..(22): 2'-O-Methyl
  misc_feature (24)..(25): 2'-O-Methyl
  misc_feature (30)..(35): 2'-O-Methyl
  misc_feature (10)..(10): n stands for hexaethylene glycol spacer
  misc_feature (23)..(23): n stands for hexaethylene glycol spacer
  misc_feature (13)..(17): 2'-deoxy-2'-amino
  misc_feature (26)..(26): 2'-deoxy-2'-amino
  misc_feature (36)..(36): n stands for inverted deoxyabasic derivative
aguuucgganucccuucaagganuccgggcaccuun

SEQ ID NO: 6519 - RNA, 37 nt, Artificial Sequence
  Description of Artificial Sequence:  Enzymatic Nucleic Acid
  misc_feature (1)..(4): Phosphorothioate 3'-Internucleotide Linkage
  misc_feature (1)..(8): 2'-O-Methyl
  misc_feature (12)..(12): 2'-O-Methyl
  misc_feature (14)..(26): 2'-O-Methyl
  misc_feature (28)..(29): 2'-O-Methyl
  misc_feature (31)..(36): 2'-O-Methyl
  misc_feature (9)..(9): 2'-deoxy-2'-C-Allyl
  misc_feature (37)..(37): n stands for inverted deoxyabasic derivative
uccaugccugaugaggccguuaggccgaaacgugcan

SEQ ID NO: 6520 - RNA, 35 nt, Artificial Sequence
  Description of Artificial Sequence:  Enzymatic Nucleic Acid
  misc_feature (1)..(4): Phosphorothioate 3'-Internucleotide Linkage
  misc_feature (1)..(7): 2'-O-Methyl
  misc_feature (11)..(11): 2'-O-Methyl
  misc_feature (13)..(25): 2'-O-Methyl
  misc_feature (27)..(28): 2'-O-Methyl
  misc_feature (30)..(34): 2'-O-Methyl
  misc_feature (8)..(8): 2'-deoxy-2'-C-Allyl
  misc_feature (35)..(35): n stands for inverted deoxyabasic derivative
ccaccccugaugaggccguuaggccgaaaggcacn

SEQ ID NO: 6521 - RNA, 33 nt, Artificial Sequence
  Description of Artificial Sequence:  Enzymatic Nucleic Acid
  misc_feature (1)..(4): Phosphorothioate 3'-Internucleotide Linkage
  misc_feature (1)..(7): 2'-O-Methyl
  misc_feature (11)..(11): 2'-O-Methyl
  misc_feature (13)..(23): 2'-O-Methyl
  misc_feature (25)..(26): 2'-O-Methyl
  misc_feature (28)..(32): 2'-O-Methyl
  misc_feature (8)..(8): 2'-deoxy-2'-C-Allyl
  misc_feature (33)..(33): n stands for inverted deoxyabasic derivative
ccaugccugaugaggcguuagccgaaacgugcn

SEQ ID NO: 6522 - RNA, 35 nt, Artificial Sequence
  Description of Artificial Sequence:  Enzymatic Nucleic Acid
  misc_feature (1)..(4): Phosphorothioate 3'-Internucleotide Linkage
  misc_feature (1)..(8): 2'-O-Methyl
  misc_feature (12)..(12): 2'-O-Methyl
  misc_feature (14)..(24): 2'-O-Methyl
  misc_feature (26)..(27): 2'-O-Methyl
  misc_feature (29)..(34): 2'-O-Methyl
  misc_feature (9)..(9): 2'-deoxy-2'-C-Allyl
  misc_feature (35)..(35): n stands for inverted deoxyabasic derivative
uccaugccugaugaggcguuagccgaaacgugcan

SEQ ID NO: 6523 - RNA, 33 nt, Artificial Sequence
  Description of Artificial Sequence:  Enzymatic Nucleic Acid
  misc_feature (1)..(4): Phosphorothioate 3'-Internucleotide Linkage
  misc_feature (1)..(7): 2'-O-Methyl
  misc_feature (11)..(11): 2'-O-Methyl
  misc_feature (13)..(23): 2'-O-Methyl
  misc_feature (25)..(26): 2'-O-Methyl
  misc_feature (28)..(32): 2'-O-Methyl
  misc_feature (8)..(8): 2'-deoxy-2'-C-Allyl
  misc_feature (33)..(33): n stands for inverted deoxyabasic derivative
ccaccccugaugaggcguuagccgaaaggcacn

SEQ ID NO: 6524 - RNA, 35 nt, Artificial Sequence
  Description of Artificial Sequence:  Enzymatic Nucleic Acid
  misc_feature (1)..(4): Phosphorothioate 3'-Internucleotide Linkage
  misc_feature (1)..(8): 2'-O-Methyl
  misc_feature (12)..(12): 2'-O-Methyl
  misc_feature (14)..(24): 2'-O-Methyl
  misc_feature (26)..(27): 2'-O-Methyl
  misc_feature (29)..(34): 2'-O-Methyl
  misc_feature (9)..(9): 2'-deoxy-2'-C-Allyl
  misc_feature (35)..(35): n stands for inverted deoxyabasic derivative
gccaccccugaugaggcguuagccgaaaggcacan

SEQ ID NO: 6525 - RNA, 13 nt, Hepatitis B virus
uucucucaauuuu

SEQ ID NO: 6526 - RNA, 15 nt, Hepatitis B virus
accuguuguccucca

SEQ ID NO: 6527 - RNA, 15 nt, Hepatitis B virus
ccuuugugucuccuc

SEQ ID NO: 6528 - RNA, 15 nt, Hepatitis B virus
uguucauguccuacu

SEQ ID NO: 6529 - RNA, 15 nt, Hepatitis B virus
gccuucugacuucuu

SEQ ID NO: 6530 - RNA, 15 nt, Hepatitis B virus
uccuccugccuccac

SEQ ID NO: 6531 - RNA, 15 nt, Hepatitis B virus
aucuccagucacuca

SEQ ID NO: 6532 - RNA, 15 nt, Hepatitis B virus
uuccucugcauccug

SEQ ID NO: 6533 - RNA, 15 nt, Hepatitis B virus
ggaggagguuagguu

SEQ ID NO: 6534 - RNA, 15 nt, Hepatitis B virus
aucuuccucugcauc

SEQ ID NO: 6535 - RNA, 15 nt, Hepatitis B virus
ucaucucauguucau

SEQ ID NO: 6536 - RNA, 15 nt, Hepatitis B virus
gcagcuccuccuccu

SEQ ID NO: 6537 - RNA, 15 nt, Hepatitis B virus
gucagcuaugucaac

SEQ ID NO: 6538 - RNA, 15 nt, Hepatitis B virus
ccguauuauccagag

SEQ ID NO: 6539 - RNA, 15 nt, Hepatitis B virus
cugccuaaucaucuc

SEQ ID NO: 6540 - RNA, 15 nt, Hepatitis B virus
uccuccaauuugucc

SEQ ID NO: 6541 - RNA, 37 nt, Artificial Sequence; identical to SEQ ID NO: 6175
  Description of Artificial Sequence:  Enzymatic Nucleic Acid
  misc_feature (1)..(7): 2'-O-Methyl
  misc_feature (15)..(26): 2'-O-Methyl
  misc_feature (31)..(36): 2'-O-Methyl
  misc_feature (37)..(37): n stands for inverted deoxyabasic derivative

SEQ ID NO: 6542 - RNA, 37 nt, Artificial Sequence; identical to SEQ ID NO: 6178
  Description of Artificial Sequence:  Enzymatic Nucleic Acid
  misc_feature (1)..(7): 2'-O-Methyl
  misc_feature (15)..(26): 2'-O-Methyl
  misc_feature (31)..(36): 2'-O-Methyl
  misc_feature (37)..(37): n stands for inverted deoxyabasic derivative

SEQ ID NO: 6543 - RNA, 37 nt, Artificial Sequence; identical to SEQ ID NO: 6182
  Description of Artificial Sequence:  Enzymatic Nucleic Acid
  misc_feature (1)..(7): 2'-O-Methyl
  misc_feature (15)..(26): 2'-O-Methyl
  misc_feature (31)..(36): 2'-O-Methyl
  misc_feature (37)..(37): n stands for inverted deoxyabasic derivative

SEQ ID NO: 6544 - RNA, 37 nt, Artificial Sequence
  Description of Artificial Sequence:  Enzymatic Nucleic Acid
  misc_feature (1)..(7): 2'-O-Methyl
  misc_feature (15)..(26): 2'-O-Methyl
  misc_feature (31)..(36): 2'-O-Methyl
  misc_feature (30)..(30): n stands for inosine
  misc_feature (37)..(37): n stands for inverted deoxyabasic derivative
uggaaagcugaugaggccguuaggccgaanguggagn

SEQ ID NO: 6545 - RNA, 37 nt, Artificial Sequence
  Description of Artificial Sequence:  Enzymatic Nucleic Acid
  misc_feature (1)..(7): 2'-O-Methyl
  misc_feature (15)..(26): 2'-O-Methyl
  misc_feature (31)..(36): 2'-O-Methyl
  misc_feature (30)..(30): n stands for inosine
  misc_feature (37)..(37): n stands for inverted deoxyabasic derivative
uggugagcugaugaggccguuaggccgaanacuggan

SEQ ID NO: 6546 - RNA, 35 nt, Artificial Sequence
  Description of Artificial Sequence:  Enzymatic Nucleic Acid
  misc_feature (1)..(4): Phosphorothioate 3'-Internucleotide Linkage
  misc_feature (1)..(8): 2'-O-Methyl
  misc_feature (12)..(12): 2'-O-Methyl
  misc_feature (14)..(24): 2'-O-Methyl
  misc_feature (26)..(27): 2'-O-Methyl
  misc_feature (29)..(34): 2'-O-Methyl
  misc_feature (9)..(9): 2'-deoxy-2'-C-Allyl
  misc_feature (35)..(35): n stands for inverted deoxyabasic derivative
gaaaauucugaugagccguuaggcgaaagagaagn

SEQ ID NO: 6547 - RNA, 35 nt, Artificial Sequence
  Description of Artificial Sequence:  Enzymatic Nucleic Acid
  misc_feature (1)..(4): Phosphorothioate 3'-Internucleotide Linkage
  misc_feature (1)..(8): 2'-O-Methyl
  misc_feature (12)..(12): 2'-O-Methyl
  misc_feature (14)..(24): 2'-O-Methyl
  misc_feature (26)..(27): 2'-O-Methyl
  misc_feature (29)..(34): 2'-O-Methyl
  misc_feature (9)..(9): 2'-deoxy-2'-C-Allyl
  misc_feature (35)..(35): n stands for inverted deoxyabasic derivative
gaaaauucugaugagccgaaaggcgaaagagaagn

SEQ ID NO: 6548 - RNA, 37 nt, Artificial Sequence
  Description of Artificial Sequence:  Enzymatic Nucleic Acid
  misc_feature (1)..(4): Phosphorothioate 3'-Internucleotide Linkage
  misc_feature (1)..(8): 2'-O-Methyl
  misc_feature (12)..(12): 2'-O-Methyl
  misc_feature (14)..(26): 2'-O-Methyl
  misc_feature (28)..(29): 2'-O-Methyl
  misc_feature (31)..(36): 2'-O-Methyl
  misc_feature (9)..(9): 2'-deoxy-2'-C-Allyl
  misc_feature (37)..(37): n stands for inverted deoxyabasic derivative
gaaaauucugaugaggccgaaaggccgaaagagaagn

SEQ ID NO: 6549 - RNA, 33 nt, Artificial Sequence
  Description of Artificial Sequence:  Enzymatic Nucleic Acid
  misc_feature (1)..(4): Phosphorothioate 3'-Internucleotide Linkage
  misc_feature (1)..(7): 2'-O-Methyl
  misc_feature (11)..(11): 2'-O-Methyl
  misc_feature (13)..(23): 2'-O-Methyl
  misc_feature (25)..(26): 2'-O-Methyl
  misc_feature (28)..(32): 2'-O-Methyl
  misc_feature (8)..(8): 2'-deoxy-2'-C-Allyl
  misc_feature (33)..(33): n stands for inverted deoxyabasic derivative
aaaauucugaugagccguuaggcgaaagagaan

SEQ ID NO: 6550 - RNA, 33 nt, Artificial Sequence
  Description of Artificial Sequence:  Enzymatic Nucleic Acid
  misc_feature (1)..(4): Phosphorothioate 3'-Internucleotide Linkage
  misc_feature (1)..(7): 2'-O-Methyl
  misc_feature (11)..(11): 2'-O-Methyl
  misc_feature (13)..(23): 2'-O-Methyl
  misc_feature (25)..(26): 2'-O-Methyl
  misc_feature (28)..(32): 2'-O-Methyl
  misc_feature (8)..(8): 2'-deoxy-2'-C-Allyl
  misc_feature (33)..(33): n stands for inverted deoxyabasic derivative
aaaauucugaugagccgaaaggcgaaagagaan

SEQ ID NO: 6551 - RNA, 35 nt, Artificial Sequence
  Description of Artificial Sequence:  Enzymatic Nucleic Acid
  misc_feature (1)..(4): Phosphorothioate 3'-Internucleotide Linkage
  misc_feature (1)..(7): 2'-O-Methyl
  misc_feature (11)..(11): 2'-O-Methyl
  misc_feature (13)..(25): 2'-O-Methyl
  misc_feature (27)..(28): 2'-O-Methyl
  misc_feature (30)..(34): 2'-O-Methyl
  misc_feature (8)..(8): 2'-deoxy-2'-C-Allyl
  misc_feature (35)..(35): n stands for inverted deoxyabasic derivative
aaaauucugaugaggccgaaaggccgaaagagaan

SEQ ID NO: 6552 - RNA, 36 nt, Artificial Sequence
  Description of Artificial Sequence:  Enzymatic Nucleic Acid
  misc_feature (1)..(8): 2'-O-Methyl
  misc_feature (12)..(16): 2'-O-Methyl
  misc_feature (18)..(26): 2'-O-Methyl
  misc_feature (28)..(35): 2'-O-Methyl
  misc_feature (36)..(36): n stands for inverted deoxyabasic derivative
uggaggaugauggcaugcacuaugcgcgaacaggun

SEQ ID NO: 6553 - RNA, 36 nt, Artificial Sequence
  Description of Artificial Sequence:  Enzymatic Nucleic Acid
  misc_feature (1)..(8): 2'-O-Methyl
  misc_feature (12)..(16): 2'-O-Methyl
  misc_feature (18)..(26): 2'-O-Methyl
  misc_feature (28)..(35): 2'-O-Methyl
  misc_feature (36)..(36): n stands for inverted deoxyabasic derivative
gaggagaugauggcaugcacuaugcgcgacaaaggn

SEQ ID NO: 6554 - RNA, 36 nt, Artificial Sequence
  Description of Artificial Sequence:  Enzymatic Nucleic Acid
  misc_feature (1)..(8): 2'-O-Methyl
  misc_feature (12)..(16): 2'-O-Methyl
  misc_feature (18)..(26): 2'-O-Methyl
  misc_feature (28)..(35): 2'-O-Methyl
  misc_feature (36)..(36): n stands for inverted deoxyabasic derivative
aguaggaugauggcaugcacuaugcgcgaugaacan

SEQ ID NO: 6555 - RNA, 36 nt, Artificial Sequence
  Description of Artificial Sequence:  Enzymatic Nucleic Acid
  misc_feature (1)..(8): 2'-O-Methyl
  misc_feature (12)..(16): 2'-O-Methyl
  misc_feature (18)..(26): 2'-O-Methyl
  misc_feature (28)..(35): 2'-O-Methyl
  misc_feature (36)..(36): n stands for inverted deoxyabasic derivative
aagaaguugauggcaugcacuaugcgcgagaaggcn

SEQ ID NO: 6556 - RNA, 36 nt, Artificial Sequence
  Description of Artificial Sequence:  Enzymatic Nucleic Acid
  misc_feature (1)..(8): 2'-O-Methyl
  misc_feature (12)..(16): 2'-O-Methyl
  misc_feature (18)..(26): 2'-O-Methyl
  misc_feature (28)..(35): 2'-O-Methyl
  misc_feature (36)..(36): n stands for inverted deoxyabasic derivative
guggaggugauggcaugcacuaugcgcgaggaggan

SEQ ID NO: 6557 - RNA, 36 nt, Artificial Sequence
  Description of Artificial Sequence:  Enzymatic Nucleic Acid
  misc_feature (1)..(16): 2'-O-Methyl
  misc_feature (18)..(23): 2'-O-Methyl
  misc_feature (26)..(26): 2'-O-Methyl
  misc_feature (28)..(35): 2'-O-Methyl
  misc_feature (17)..(17): 2'-deoxy-2'-amino
  misc_feature (27)..(27): 2'-deoxy-2'-amino
  misc_feature (36)..(36): n stands for inverted deoxyabasic derivative
ugagugagccgaaaggcgagugaggucuuggagaun

SEQ ID NO: 6558 - RNA, 36 nt, Artificial Sequence
  Description of Artificial Sequence:  Enzymatic Nucleic Acid
  misc_feature (1)..(16): 2'-O-Methyl
  misc_feature (18)..(23): 2'-O-Methyl
  misc_feature (26)..(26): 2'-O-Methyl
  misc_feature (28)..(35): 2'-O-Methyl
  misc_feature (17)..(17): 2'-deoxy-2'-amino
  misc_feature (27)..(27): 2'-deoxy-2'-amino
  misc_feature (36)..(36): n stands for inverted deoxyabasic derivative
uggaggagccgaaaggcgagugaggucuaacaggun

SEQ ID NO: 6559 - RNA, 36 nt, Artificial Sequence
  Description of Artificial Sequence:  Enzymatic Nucleic Acid
  misc_feature (1)..(16): 2'-O-Methyl
  misc_feature (18)..(23): 2'-O-Methyl
  misc_feature (26)..(26): 2'-O-Methyl
  misc_feature (28)..(35): 2'-O-Methyl
  misc_feature (17)..(17): 2'-deoxy-2'-amino
  misc_feature (27)..(27): 2'-deoxy-2'-amino
  misc_feature (36)..(36): n stands for inverted deoxyabasic derivative
caggauggccgaaaggcgagugaggucuagaggaan

SEQ ID NO: 6560 - RNA, 36 nt, Artificial Sequence
  Description of Artificial Sequence:  Enzymatic Nucleic Acid
  misc_feature (1)..(16): 2'-O-Methyl
  misc_feature (18)..(23): 2'-O-Methyl
  misc_feature (26)..(26): 2'-O-Methyl
  misc_feature (28)..(35): 2'-O-Methyl
  misc_feature (17)..(17): 2'-deoxy-2'-amino
  misc_feature (27)..(27): 2'-deoxy-2'-amino
  misc_feature (36)..(36): n stands for inverted deoxyabasic derivative
gaggagagccgaaaggcgagugaggucuacaaaggn

SEQ ID NO: 6561 - RNA, 36 nt, Artificial Sequence
  Description of Artificial Sequence:  Enzymatic Nucleic Acid
  misc_feature (1)..(16): 2'-O-Methyl
  misc_feature (18)..(23): 2'-O-Methyl
  misc_feature (26)..(26): 2'-O-Methyl
  misc_feature (28)..(35): 2'-O-Methyl
  misc_feature (17)..(17): 2'-deoxy-2'-amino
  misc_feature (27)..(27): 2'-deoxy-2'-amino
  misc_feature (36)..(36): n stands for inverted deoxyabasic derivative
aaccuaagccgaaaggcgagugaggucucuccuccn

SEQ ID NO: 6562 - RNA, 37 nt, Artificial Sequence
  Description of Artificial Sequence:  Enzymatic Nucleic Acid
  misc_feature (1)..(7): 2'-O-Methyl
  misc_feature (15)..(26): 2'-O-Methyl
  misc_feature (31)..(36): 2'-O-Methyl
  misc_feature (30)..(30): n stands for inosine
  misc_feature (37)..(37): n stands for inverted deoxyabasic derivative
gaugcagcugaugaggccguuaggccgaangaagaun

SEQ ID NO: 6563 - RNA, 37 nt, Artificial Sequence
  Description of Artificial Sequence:  Enzymatic Nucleic Acid
  misc_feature (1)..(7): 2'-O-Methyl
  misc_feature (15)..(26): 2'-O-Methyl
  misc_feature (31)..(36): 2'-O-Methyl
  misc_feature (30)..(30): n stands for inosine
  misc_feature (37)..(37): n stands for inverted deoxyabasic derivative
augaacacugaugaggccguuaggccgaanagaugan

SEQ ID NO: 6564 - RNA, 37 nt, Artificial Sequence
  Description of Artificial Sequence:  Enzymatic Nucleic Acid
  misc_feature (1)..(7): 2'-O-Methyl
  misc_feature (15)..(26): 2'-O-Methyl
  misc_feature (31)..(36): 2'-O-Methyl
  misc_feature (30)..(30): n stands for inosine
  misc_feature (37)..(37): n stands for inverted deoxyabasic derivative
aggaggacugaugaggccguuaggccgaanagcugcn

SEQ ID NO: 6565 - RNA, 37 nt, Artificial Sequence
  Description of Artificial Sequence:  Enzymatic Nucleic Acid
  misc_feature (1)..(7): 2'-O-Methyl
  misc_feature (15)..(26): 2'-O-Methyl
  misc_feature (31)..(36): 2'-O-Methyl
  misc_feature (37)..(37): n stands for inverted deoxyabasic derivative
guugacacugaugaggccguuaggccgaaagcugacn

SEQ ID NO: 6566 - RNA, 37 nt, Artificial Sequence
  Description of Artificial Sequence:  Enzymatic Nucleic Acid
  misc_feature (1)..(7): 2'-O-Methyl
  misc_feature (15)..(26): 2'-O-Methyl
  misc_feature (31)..(36): 2'-O-Methyl
  misc_feature (37)..(37): n stands for inverted deoxyabasic derivative
cucuggacugaugaggccguuaggccgaaaauacggn

SEQ ID NO: 6567 - DNA, 30 bp, Artificial Sequence
  Description of Artificial Sequence:  Enzymatic Nucleic Acid
  misc_feature (1)..(7): 2'-O-Methyl
  misc_feature (23)..(29): 2'-O-Methyl
  misc_feature (30)..(30): n stands for inverted deoxyabasic derivative
uggaggaggctagctacaacgaaacaggun

SEQ ID NO: 6568 - DNA, 30 bp, Artificial Sequence
  Description of Artificial Sequence:  Enzymatic Nucleic Acid
  misc_feature (1)..(7): 2'-O-Methyl
  misc_feature (23)..(29): 2'-O-Methyl
  misc_feature (30)..(30): n stands for inverted deoxyabasic derivative
ugagugaggctagctacaacgauggagaun

SEQ ID NO: 6569 - DNA, 30 bp, Artificial Sequence
  Description of Artificial Sequence:  Enzymatic Nucleic Acid
  misc_feature (1)..(7): 2'-O-Methyl
  misc_feature (23)..(29): 2'-O-Methyl
  misc_feature (30)..(30): n stands for inverted deoxyabasic derivative
gagaugaggctagctacaacgauaggcagn

SEQ ID NO: 6570 - DNA, 30 bp, Artificial Sequence
  Description of Artificial Sequence:  Enzymatic Nucleic Acid
  misc_feature (1)..(7): 2'-O-Methyl
  misc_feature (23)..(29): 2'-O-Methyl
  misc_feature (30)..(30): n stands for inverted deoxyabasic derivative
ggacaaaggctagctacaacgauggaggan

SEQ ID NO: 6571 - DNA, 30 bp, Artificial Sequence
  Description of Artificial Sequence:  Enzymatic Nucleic Acid
  misc_feature (1)..(7): 2'-O-Methyl
  misc_feature (23)..(29): 2'-O-Methyl
  misc_feature (30)..(30): n stands for inverted deoxyabasic derivative
gaggagaggctagctacaacgaacaaaggn

SEQ ID NO: 6572 - RNA, 33 nt, Artificial Sequence
  Description of Artificial Sequence:  Enzymatic Nucleic Acid
  misc_feature (1)..(4): Phosphorothioate 3'-Internucleotide Linkage
  misc_feature (1)..(7): 2'-O-Methyl
  misc_feature (11)..(11): 2'-O-Methyl
  misc_feature (13)..(23): 2'-O-Methyl
  misc_feature (25)..(26): 2'-O-Methyl
  misc_feature (28)..(32): 2'-O-Methyl
  misc_feature (8)..(8): 2'-deoxy-2'-C-Allyl
  misc_feature (33)..(33): n stands for inverted deoxyabasic derivative
cgaugucuagugacccgaaaggggaaaagaggn

SEQ ID NO: 6573 - RNA, 15 nt, Artificial Sequence
  Description of Artificial Sequence:  Nucleic Acid Substrate
  misc_feature (1)..(7): n stands for any a, c, g, or u
  misc_feature (9)..(9): n stands for any a, c, g, or u
  misc_feature (13)..(15): n stands for any a, c, g, or u
nnnnnnnynghynnn

SEQ ID NO: 6574 - RNA, 47 nt, Artificial Sequence
  Description of Artificial Sequence:  Enzymatic Nucleic Acid
  misc_feature (1)..(4): n stands for any a, c, g, or u
  misc_feature (9)..(19): n stands for any a, c, g, or u
  misc_feature (25)..(31): n stands for any a, c, g, or u
  misc_feature (39)..(47): n stands for any a, c, g, or u
nnnngaagnnnnnnnnnnnaaahannnnnnnacauuacnnnnnnnnn

SEQ ID NO: 6575 - RNA, 15 nt, Artificial Sequence
  Description of Artificial Sequence:  Nucleic Acid Substrate
  misc_feature (1)..(6): n stands for a, c, g, or u
  misc_feature (9)..(15): n stands for a, c, g, or u
nnnnnnuhnnnnnnn

SEQ ID NO: 6576 - RNA, 36 nt, Artificial Sequence
  Description of Artificial Sequence:  Enzymatic Nucleic Acid
  misc_feature (1)..(7): n stands for a, c, g, or u
  misc_feature (16)..(18): n stands for a, c, g, or u
  misc_feature (23)..(25): n stands for a, c, g, or u
  misc_feature (31)..(36): n stands for a, c, g, or u
  misc_feature (1)..(8): 2'-O-Methyl
  misc_feature (12)..(12): 2'-O-Methyl
  misc_feature (14)..(26): 2'-O-Methyl
  misc_feature (28)..(29): 2'-O-Methyl
  misc_feature (31)..(36): 2'-O-Methyl
  misc_feature (9)..(9): 2'-deoxy-2'-C-Allyl
nnnnnnncugaugagnnngaaannncgaaannnnnn

SEQ ID NO: 6577 - RNA, 14 nt, Artificial Sequence
  Description of Artificial Sequence:  Nucleic Acid Substrate
  misc_feature (1)..(5): n stands for a, c, g, or u
  misc_feature (8)..(14): n stands for a, c, g, or u
nnnnnchnnnnnnn

SEQ ID NO: 6578 - RNA, 35 nt, Artificial Sequence
  Description of Artificial Sequence:  Enzymatic Nucleic Acid
  misc_feature (1)..(7): n stands for a, c, g, or u
  misc_feature (16)..(18): n stands for a, c, g, or u
  misc_feature (23)..(25): n stands for a, c, g, or u
  misc_feature (31)..(35): n stands for a, c, g, or u
  misc_feature (1)..(8): 2'-O-Methyl
  misc_feature (12)..(12): 2'-O-Methyl
  misc_feature (14)..(26): 2'-O-Methyl
  misc_feature (28)..(29): 2'-O-Methyl
  misc_feature (31)..(35): 2'-O-Methyl
  misc_feature (30)..(30): n stands for Inosine
  misc_feature (9)..(9): 2'-deoxy-2'-C-Allyl
nnnnnnncugaugagnnngaaannncgaannnnnn

SEQ ID NO: 6579 - RNA, 15 nt, Artificial Sequence
  Description of Artificial Sequence:  Nucleic Acid Substrate
  misc_feature (1)..(6): n stands for a, c, g, or u
  misc_feature (9)..(15): n stands for a, c, g, or u
nnnnnnygnnnnnnn

SEQ ID NO: 6580 - RNA, 35 nt, Artificial Sequence
  Description of Artificial Sequence:  Enzymatic Nucleic Acid
  misc_feature (1)..(7): n stands for a, c, g, or u
  misc_feature (29)..(35): n stands for a, c, g, or u
  misc_feature (1)..(8): 2'-O-Methyl
  misc_feature (13)..(16): 2'-O-Methyl
  misc_feature (18)..(35): 2'-O-Methyl
  misc_feature (11)..(11): Phosphorothioate 3'-Internucleotide Linkage
nnnnnnnugauggcaugcacuaugcgcgnnnnnnn

SEQ ID NO: 6581 - RNA, 16 nt, Homo sapiens
gccguggguugcacac

SEQ ID NO: 6582 - RNA, 48 nt, Artificial Sequence
  Description of Artificial Sequence:  Enzymatic Nucleic Acid
  misc_feature (1)..(8): 2'-O-Methyl
  misc_feature (12)..(21): 2'-O-Methyl
  misc_feature (32)..(37): 2'-O-Methyl
  misc_feature (44)..(48): 2'-O-Methyl
  misc_feature (9)..(10): 2'-deoxy-2'-amino
  misc_feature (22)..(26): 2'-deoxy-2'-amino
  misc_feature (38)..(40): 2'-deoxy-2'-amino
gugugcaaccggaggaaacucccuucaaggacgaaaguccgggacggg

SEQ ID NO: 6583 - RNA, 15 nt, Homo sapiens
gcgcggcgcaggcac

SEQ ID NO: 6584 - RNA, 36 nt, Artificial Sequence
  Description of Artificial Sequence:  Enzymatic Nucleic Acid
  misc_feature (1)..(7): 2'-O-Methyl
  misc_feature (9)..(15): 2'-O-Methyl
  misc_feature (19)..(19): 2'-O-Methyl
  misc_feature (21)..(21): 2'-O-Methyl
  misc_feature (23)..(23): 2'-O-Methyl
  misc_feature (26)..(26): 2'-O-Methyl
  misc_feature (28)..(35): 2'-O-Methyl
  misc_feature (1)..(4): Phosphorothioate 3'-Internucleotide Linkage
  misc_feature (17)..(17): 2'-Deoxy-2'-Amino
  misc_feature (27)..(27): 2'-Deoxy-2'-Amino
  misc_feature (36)..(36): n stands for inverted deoxyabasic derivative
gugccuggccgaaaggcgagugaggucugccgcgcn

SEQ ID NO: 6585 - DNA, 16 bp, Artificial Sequence
  Description of Artificial Sequence:  Enzymatic Nucleic Acid
rggctagctacaacga

SEQ ID NO: 6586 - RNA, 10 nt, Artificial Sequence
  Description of Artificial Sequence:  Enzymatic Nucleic Acid Stem Loop
gccguuaggc

SEQ ID NO: 6587 - RNA, 35 nt, Artificial Sequence
  Description of Artificial Sequence:  Enzymatic Nucleic Acid
  misc_feature (1)..(6): n stands for a, c, g, or u
  misc_feature (30)..(34): n stands for a, c, g, or u
  misc_feature (1)..(4): Phosphorothioate 3'-Internucleotide Linkage
  misc_feature (7)..(7): 2'-O-methyl
  misc_feature (9)..(29): 2'-O-methyl
  misc_feature (8)..(8): 2'-deoxy-2'-C-Allyl
  misc_feature (35)..(35): n stands for inverted deoxyabasic derivative
nnnnnncugaugaggccguuaggccgaaannnnnn

SEQ ID NO: 6588 - RNA, 13 nt, Artificial Sequence
  Description of Artificial Sequence:  Nucleic Acid Substrate
  misc_feature (1)..(5): n stands for a, c, g, or u
  misc_feature (8)..(13): n stands for a, c, g, or u
nnnnnuhnnnnnn

SEQ ID NO: 6589 - RNA, 37 nt, Artificial Sequence; identical to SEQ ID NO: 6228
  Description of Artificial Sequence:  Enzymatic Nucleic Acid
  misc_feature (1)..(4): Phosphorothioate 3'-Internucleotide Linkage
  misc_feature (1)..(8): 2'-O-Methyl
  misc_feature (10)..(36): 2'-O-Methyl
  misc_feature (9)..(9): 2'-deoxy-2'-C-Allyl
  misc_feature (37)..(37): n stands for inverted deoxyabasic derivative

SEQ ID NO: 6590 - RNA, 37 nt, Artificial Sequence
  Description of Artificial Sequence:  Enzymatic Nucleic Acid
  misc_feature (1)..(4): Phosphorothioate 3'-Internucleotide Linkage
  misc_feature (1)..(8): 2'-O-Methyl
  misc_feature (10)..(36): 2'-O-Methyl
  misc_feature (9)..(9): 2'-deoxy-2'-C-Allyl
  misc_feature (37)..(37): n stands for inverted deoxyabasic derivative
gaaaauucuagugacgccguuaggcggaaagagaagn

SEQ ID NO: 6591 - RNA, 37 nt, Artificial Sequence
  Description of Artificial Sequence:  Enzymatic Nucleic Acid
  misc_feature (1)..(4): Phosphorothioate 3'-Internucleotide Linkage
  misc_feature (1)..(8): 2'-O-Methyl
  misc_feature (10)..(36): 2'-O-Methyl
  misc_feature (9)..(9): 2'-deoxy-2'-C-Allyl
  misc_feature (37)..(37): n stands for inverted deoxyabasic derivative
aaugaggcuagugacgccguuaggcggaaaaaugaan

SEQ ID NO: 6592 - RNA, 37 nt, Artificial Sequence; identical to SEQ ID NO: 6591
  Description of Artificial Sequence:  Enzymatic Nucleic Acid
  misc_feature (1)..(4): Phosphorothioate 3'-Internucleotide Linkage
  misc_feature (1)..(8): 2'-O-Methyl
  misc_feature (12)..(12): 2'-O-Methyl
  misc_feature (14)..(26): 2'-O-Methyl
  misc_feature (28)..(29): 2'-O-Methyl
  misc_feature (31)..(36): 2'-O-Methyl
  misc_feature (9)..(9): 2'-deoxy-2'-C-Allyl
  misc_feature (37)..(37): n stands for inverted deoxyabasic derivative

What we claim is:

1. An enzymatic nucleic acid molecule that specifically cleaves RNA derived from hepatitis B virus (HBV), wherein said enzymatic nucleic acid molecule comprises one or more binding arms and wherein said enzymatic nucleic acid molecule does not require the presence of a 2′-OH group within said enzymatic nucleic acid molecule for activity.

2. The enzymatic nucleic acid molecule of claim 1, wherein said binding arm(s) of said enzymatic nucleic acid molecule comprises between 12 and 100 nucleotides.

3. The enzymatic nucleic acid molecule of claim 1, wherein said binding arm(s) of said enzymatic nucleic acid molecule comprises between 14 and 24 bases.

4. The enzymatic nucleic acid molecule of claim 1, wherein said enzymatic nucleic acid is chemically synthesized.

5. The enzymatic nucleic acid molecule of claim 1, wherein said enzymatic nucleic acid comprises at least one 2′-sugar modification.

6. The enzymatic nucleic acid molecule of claim 1, wherein said enzymatic nucleic acid comprises at least one nucleic acid base modification.

7. The enzymatic nucleic acid molecule of claim 1, wherein said enzymatic nucleic acid comprises at least one phosphate backbone modification.

8. A mammalian cell comprising the enzymatic nucleic acid molecule of claim 1.

9. The mammalian cell of claim 8, wherein said mammalian cell is a human cell.
